United States Patent Application Publication US 2015/0159161 A1 - sequence listing, part 3

SEQ ID NO: 73639 - DNA, 15 bp, Homo sapiens
tctgggctccagcga

SEQ ID NO: 73640 - DNA, 15 bp, Homo sapiens
ctgggctccagcgat

SEQ ID NO: 73641 - DNA, 15 bp, Homo sapiens
tgggctccagcgatc

SEQ ID NO: 73642 - DNA, 15 bp, Homo sapiens
gggctccagcgatcc

SEQ ID NO: 73643 - DNA, 15 bp, Homo sapiens
ggctccagcgatcct

SEQ ID NO: 73644 - DNA, 15 bp, Homo sapiens
gctccagcgatcctc

SEQ ID NO: 73645 - DNA, 15 bp, Homo sapiens
ctccagcgatcctcc

SEQ ID NO: 73646 - DNA, 15 bp, Homo sapiens
tccagcgatcctccc

SEQ ID NO: 73647 - DNA, 15 bp, Homo sapiens
ccagcgatcctccca

SEQ ID NO: 73648 - DNA, 15 bp, Homo sapiens
cagcgatcctcccac

SEQ ID NO: 73649 - DNA, 15 bp, Homo sapiens
agcgatcctcccacc

SEQ ID NO: 73650 - DNA, 15 bp, Homo sapiens
gcgatcctcccacct

SEQ ID NO: 73651 - DNA, 15 bp, Homo sapiens
cgatcctcccacctc

SEQ ID NO: 73652 - DNA, 15 bp, Homo sapiens
atcctcccacctcat

SEQ ID NO: 73653 - DNA, 15 bp, Homo sapiens
tcctcccacctcatc

SEQ ID NO: 73654 - DNA, 15 bp, Homo sapiens
cctcccacctcatcc

SEQ ID NO: 73655 - DNA, 15 bp, Homo sapiens
ctcccacctcatcct

SEQ ID NO: 73656 - DNA, 15 bp, Homo sapiens
tcccacctcatcctc

SEQ ID NO: 73657 - DNA, 15 bp, Homo sapiens
cccacctcatcctct

SEQ ID NO: 73658 - DNA, 15 bp, Homo sapiens
ccacctcatcctctc

SEQ ID NO: 73659 - DNA, 15 bp, Homo sapiens
cacctcatcctctca

SEQ ID NO: 73660 - DNA, 15 bp, Homo sapiens
acctcatcctctcaa

SEQ ID NO: 73661 - DNA, 15 bp, Homo sapiens
cctcatcctctcaag

SEQ ID NO: 73662 - DNA, 15 bp, Homo sapiens
ctcatcctctcaagt

SEQ ID NO: 73663 - DNA, 15 bp, Homo sapiens
tcatcctctcaagta

SEQ ID NO: 73664 - DNA, 15 bp, Homo sapiens
catcctctcaagtag

SEQ ID NO: 73665 - DNA, 15 bp, Homo sapiens
atcctctcaagtagc

SEQ ID NO: 73666 - DNA, 15 bp, Homo sapiens
tcctctcaagtagct

SEQ ID NO: 73667 - DNA, 15 bp, Homo sapiens
cctctcaagtagctg

SEQ ID NO: 73668 - DNA, 15 bp, Homo sapiens
ctctcaagtagctgg

SEQ ID NO: 73669 - DNA, 15 bp, Homo sapiens
tctcaagtagctggg

SEQ ID NO: 73670 - DNA, 15 bp, Homo sapiens
ctcaagtagctggga

SEQ ID NO: 73671 - DNA, 15 bp, Homo sapiens
tcaagtagctgggac

SEQ ID NO: 73672 - DNA, 15 bp, Homo sapiens
caagtagctgggacc

SEQ ID NO: 73673 - DNA, 15 bp, Homo sapiens
aagtagctgggacca

SEQ ID NO: 73674 - DNA, 15 bp, Homo sapiens
agtagctgggaccac

SEQ ID NO: 73675 - DNA, 15 bp, Homo sapiens
gtagctgggaccaca

SEQ ID NO: 73676 - DNA, 15 bp, Homo sapiens
tagctgggaccacag

SEQ ID NO: 73677 - DNA, 15 bp, Homo sapiens
agctgggaccacagg

SEQ ID NO: 73678 - DNA, 15 bp, Homo sapiens
gctgggaccacaggc

SEQ ID NO: 73679 - DNA, 15 bp, Homo sapiens
ctgggaccacaggcg

SEQ ID NO: 73680 - DNA, 15 bp, Homo sapiens
tgggaccacaggcgt

SEQ ID NO: 73681 - DNA, 15 bp, Homo sapiens
gggaccacaggcgtg

SEQ ID NO: 73682 - DNA, 15 bp, Homo sapiens
ggaccacaggcgtgt

SEQ ID NO: 73683 - DNA, 15 bp, Homo sapiens
gaccacaggcgtgtg

SEQ ID NO: 73684 - DNA, 15 bp, Homo sapiens
accacaggcgtgtgt

SEQ ID NO: 73685 - DNA, 15 bp, Homo sapiens
ccacaggcgtgtgtc

SEQ ID NO: 73686 - DNA, 15 bp, Homo sapiens
cacaggcgtgtgtca

SEQ ID NO: 73687 - DNA, 15 bp, Homo sapiens
acaggcgtgtgtcac

SEQ ID NO: 73688 - DNA, 15 bp, Homo sapiens
caggcgtgtgtcacc

SEQ ID NO: 73689 - DNA, 15 bp, Homo sapiens
aggcgtgtgtcaccg

SEQ ID NO: 73690 - DNA, 15 bp, Homo sapiens
ggcgtgtgtcaccgt

SEQ ID NO: 73691 - DNA, 15 bp, Homo sapiens
gcgtgtgtcaccgta

SEQ ID NO: 73692 - DNA, 15 bp, Homo sapiens
cgtgtgtcaccgtac

SEQ ID NO: 73693 - DNA, 15 bp, Homo sapiens
gtgtgtcaccgtaca

SEQ ID NO: 73694 - DNA, 15 bp, Homo sapiens
tgtgtcaccgtacat

SEQ ID NO: 73695 - DNA, 15 bp, Homo sapiens
gtgtcaccgtacatg

SEQ ID NO: 73696 - DNA, 15 bp, Homo sapiens
tgtcaccgtacatgg

SEQ ID NO: 73697 - DNA, 15 bp, Homo sapiens
gtcaccgtacatggc

SEQ ID NO: 73698 - DNA, 15 bp, Homo sapiens
tcaccgtacatggct

SEQ ID NO: 73699 - DNA, 15 bp, Homo sapiens
caccgtacatggcta

SEQ ID NO: 73700 - DNA, 15 bp, Homo sapiens
accgtacatggctaa

SEQ ID NO: 73701 - DNA, 15 bp, Homo sapiens
ccgtacatggctaat

SEQ ID NO: 73702 - DNA, 15 bp, Homo sapiens
cgtacatggctaatt

SEQ ID NO: 73703 - DNA, 15 bp, Homo sapiens
gtacatggctaattt

SEQ ID NO: 73704 - DNA, 15 bp, Homo sapiens
tacatggctaatttt

SEQ ID NO: 73705 - DNA, 15 bp, Homo sapiens
acatggctaattttt

SEQ ID NO: 73706 - DNA, 15 bp, Homo sapiens
catggctaatttttc

SEQ ID NO: 73707 - DNA, 15 bp, Homo sapiens
atggctaatttttct

SEQ ID NO: 73708 - DNA, 15 bp, Homo sapiens
tggctaatttttcta

SEQ ID NO: 73709 - DNA, 15 bp, Homo sapiens
ggctaatttttctat

SEQ ID NO: 73710 - DNA, 15 bp, Homo sapiens
gctaatttttctatt

SEQ ID NO: 73711 - DNA, 15 bp, Homo sapiens
ctaatttttctattt

SEQ ID NO: 73712 - DNA, 15 bp, Homo sapiens
taatttttctatttt

SEQ ID NO: 73713 - DNA, 15 bp, Homo sapiens
aatttttctattttt

SEQ ID NO: 73714 - DNA, 15 bp, Homo sapiens
atttttctattttta

SEQ ID NO: 73715 - DNA, 15 bp, Homo sapiens
tttttctatttttag

SEQ ID NO: 73716 - DNA, 15 bp, Homo sapiens
ttttctatttttagt

SEQ ID NO: 73717 - DNA, 15 bp, Homo sapiens
tttctatttttagta

SEQ ID NO: 73718 - DNA, 15 bp, Homo sapiens
ttctatttttagtag

SEQ ID NO: 73719 - DNA, 15 bp, Homo sapiens
tctatttttagtaga

SEQ ID NO: 73720 - DNA, 15 bp, Homo sapiens
ctatttttagtagag

SEQ ID NO: 73721 - DNA, 15 bp, Homo sapiens
tatttttagtagagg

SEQ ID NO: 73722 - DNA, 15 bp, Homo sapiens
atttttagtagaggc

SEQ ID NO: 73723 - DNA, 15 bp, Homo sapiens
tttttagtagaggca

SEQ ID NO: 73724 - DNA, 15 bp, Homo sapiens
ttttagtagaggcag

SEQ ID NO: 73725 - DNA, 15 bp, Homo sapiens
tttagtagaggcaga

SEQ ID NO: 73726 - DNA, 15 bp, Homo sapiens
ttagtagaggcagag

SEQ ID NO: 73727 - DNA, 15 bp, Homo sapiens
tagtagaggcagagt

SEQ ID NO: 73728 - DNA, 15 bp, Homo sapiens
agtagaggcagagtt

SEQ ID NO: 73729 - DNA, 15 bp, Homo sapiens
gtagaggcagagttt

SEQ ID NO: 73730 - DNA, 15 bp, Homo sapiens
tagaggcagagtttc

SEQ ID NO: 73731 - DNA, 15 bp, Homo sapiens
agaggcagagtttcg

SEQ ID NO: 73732 - DNA, 15 bp, Homo sapiens
gaggcagagtttcgc

SEQ ID NO: 73733 - DNA, 15 bp, Homo sapiens
aggcagagtttcgcc

SEQ ID NO: 73734 - DNA, 15 bp, Homo sapiens
ggcagagtttcgcca

SEQ ID NO: 73735 - DNA, 15 bp, Homo sapiens
gcagagtttcgccat

SEQ ID NO: 73736 - DNA, 15 bp, Homo sapiens
cagagtttcgccatg

SEQ ID NO: 73737 - DNA, 15 bp, Homo sapiens
agagtttcgccatgt

SEQ ID NO: 73738 - DNA, 15 bp, Homo sapiens
gagtttcgccatgtt

SEQ ID NO: 73739 - DNA, 15 bp, Homo sapiens
agtttcgccatgttt

SEQ ID NO: 73740 - DNA, 15 bp, Homo sapiens
gtttcgccatgtttt

SEQ ID NO: 73741 - DNA, 15 bp, Homo sapiens
tttcgccatgttttc

SEQ ID NO: 73742 - DNA, 15 bp, Homo sapiens
ttcgccatgttttcc

SEQ ID NO: 73743 - DNA, 15 bp, Homo sapiens
tcgccatgttttcca

SEQ ID NO: 73744 - DNA, 15 bp, Homo sapiens
cgccatgttttccag

SEQ ID NO: 73745 - DNA, 15 bp, Homo sapiens
gccatgttttccagg

SEQ ID NO: 73746 - DNA, 15 bp, Homo sapiens
ccatgttttccaggc

SEQ ID NO: 73747 - DNA, 15 bp, Homo sapiens
catgttttccaggct

SEQ ID NO: 73748 - DNA, 15 bp, Homo sapiens
atgttttccaggctg

SEQ ID NO: 73749 - DNA, 15 bp, Homo sapiens
tgttttccaggctgg

SEQ ID NO: 73750 - DNA, 15 bp, Homo sapiens
gttttccaggctggt

SEQ ID NO: 73751 - DNA, 15 bp, Homo sapiens
ttttccaggctggtc

SEQ ID NO: 73752 - DNA, 15 bp, Homo sapiens
tttccaggctggtct

SEQ ID NO: 73753 - DNA, 15 bp, Homo sapiens
ttccaggctggtctc

SEQ ID NO: 73754 - DNA, 15 bp, Homo sapiens
tctcgaactcctgaa

SEQ ID NO: 73755 - DNA, 15 bp, Homo sapiens
ctcgaactcctgaac

SEQ ID NO: 73756 - DNA, 15 bp, Homo sapiens
tcgaactcctgaact

SEQ ID NO: 73757 - DNA, 15 bp, Homo sapiens
cgaactcctgaactc

SEQ ID NO: 73758 - DNA, 15 bp, Homo sapiens
gaactcctgaactca

SEQ ID NO: 73759 - DNA, 15 bp, Homo sapiens
aactcctgaactcaa

SEQ ID NO: 73760 - DNA, 15 bp, Homo sapiens
actcctgaactcaag

SEQ ID NO: 73761 - DNA, 15 bp, Homo sapiens
ctcctgaactcaagc

SEQ ID NO: 73762 - DNA, 15 bp, Homo sapiens
tcctgaactcaagca

SEQ ID NO: 73763 - DNA, 15 bp, Homo sapiens
cctgaactcaagcag

SEQ ID NO: 73764 - DNA, 15 bp, Homo sapiens
ctgaactcaagcagt

SEQ ID NO: 73765 - DNA, 15 bp, Homo sapiens
tgaactcaagcagtc

SEQ ID NO: 73766 - DNA, 15 bp, Homo sapiens
gaactcaagcagtcc

SEQ ID NO: 73767 - DNA, 15 bp, Homo sapiens
aactcaagcagtcca

SEQ ID NO: 73768 - DNA, 15 bp, Homo sapiens
actcaagcagtccac

SEQ ID NO: 73769 - DNA, 15 bp, Homo sapiens
ctcaagcagtccacc

SEQ ID NO: 73770 - DNA, 15 bp, Homo sapiens
tcaagcagtccacct

SEQ ID NO: 73771 - DNA, 15 bp, Homo sapiens
caagcagtccacctg

SEQ ID NO: 73772 - DNA, 15 bp, Homo sapiens
aagcagtccacctgt

SEQ ID NO: 73773 - DNA, 15 bp, Homo sapiens
agcagtccacctgtc

SEQ ID NO: 73774 - DNA, 15 bp, Homo sapiens
gcagtccacctgtct

SEQ ID NO: 73775 - DNA, 15 bp, Homo sapiens
cagtccacctgtctc

SEQ ID NO: 73776 - DNA, 15 bp, Homo sapiens
agtccacctgtctca

SEQ ID NO: 73777 - DNA, 15 bp, Homo sapiens
gtccacctgtctcag

SEQ ID NO: 73778 - DNA, 15 bp, Homo sapiens
tccacctgtctcagc

SEQ ID NO: 73779 - DNA, 15 bp, Homo sapiens
ccacctgtctcagcc

SEQ ID NO: 73780 - DNA, 15 bp, Homo sapiens
cacctgtctcagcct

SEQ ID NO: 73781 - DNA, 15 bp, Homo sapiens
acctgtctcagcctc

SEQ ID NO: 73782 - DNA, 15 bp, Homo sapiens
ctgtctcagcctccc

SEQ ID NO: 73783 - DNA, 15 bp, Homo sapiens
tgtctcagcctccca

SEQ ID NO: 73784 - DNA, 15 bp, Homo sapiens
gtctcagcctcccaa

SEQ ID NO: 73785 - DNA, 15 bp, Homo sapiens
tacaggcgtgagcct

SEQ ID NO: 73786 - DNA, 15 bp, Homo sapiens
acaggcgtgagcctc

SEQ ID NO: 73787 - DNA, 15 bp, Homo sapiens
caggcgtgagcctcc

SEQ ID NO: 73788 - DNA, 15 bp, Homo sapiens
aggcgtgagcctcca

SEQ ID NO: 73789 - DNA, 15 bp, Homo sapiens
ggcgtgagcctccac

SEQ ID NO: 73790 - DNA, 15 bp, Homo sapiens
gcgtgagcctccact

SEQ ID NO: 73791 - DNA, 15 bp, Homo sapiens
cgtgagcctccactc

SEQ ID NO: 73792 - DNA, 15 bp, Homo sapiens
gtgagcctccactcc

SEQ ID NO: 73793 - DNA, 15 bp, Homo sapiens
tgagcctccactccc

SEQ ID NO: 73794 - DNA, 15 bp, Homo sapiens
gagcctccactccca

SEQ ID NO: 73795 - DNA, 15 bp, Homo sapiens
agcctccactcccag

SEQ ID NO: 73796 - DNA, 15 bp, Homo sapiens
gcctccactcccagt

SEQ ID NO: 73797 - DNA, 15 bp, Homo sapiens
cctccactcccagtc

SEQ ID NO: 73798 - DNA, 15 bp, Homo sapiens
ctccactcccagtct

SEQ ID NO: 73799 - DNA, 15 bp, Homo sapiens
tccactcccagtctc

SEQ ID NO: 73800 - DNA, 15 bp, Homo sapiens
ccactcccagtctca

SEQ ID NO: 73801 - DNA, 15 bp, Homo sapiens
cactcccagtctcaa

SEQ ID NO: 73802 - DNA, 15 bp, Homo sapiens
actcccagtctcaaa

SEQ ID NO: 73803 - DNA, 15 bp, Homo sapiens
ctcccagtctcaaat

SEQ ID NO: 73804 - DNA, 15 bp, Homo sapiens
tcccagtctcaaata

SEQ ID NO: 73805 - DNA, 15 bp, Homo sapiens
cccagtctcaaatat

SEQ ID NO: 73806 - DNA, 15 bp, Homo sapiens
ccagtctcaaatatt

SEQ ID NO: 73807 - DNA, 15 bp, Homo sapiens
cagtctcaaatattc

SEQ ID NO: 73808 - DNA, 15 bp, Homo sapiens
agtctcaaatattct

SEQ ID NO: 73809 - DNA, 15 bp, Homo sapiens
gtctcaaatattctt

SEQ ID NO: 73810 - DNA, 15 bp, Homo sapiens
tctcaaatattcttt

SEQ ID NO: 73811 - DNA, 15 bp, Homo sapiens
ctcaaatattctttt

SEQ ID NO: 73812 - DNA, 15 bp, Homo sapiens
tcaaatattcttttg

SEQ ID NO: 73813 - DNA, 15 bp, Homo sapiens
caaatattcttttga

SEQ ID NO: 73814 - DNA, 15 bp, Homo sapiens
aaatattcttttgaa

SEQ ID NO: 73815 - DNA, 15 bp, Homo sapiens
aatattcttttgaaa

SEQ ID NO: 73816 - DNA, 15 bp, Homo sapiens
atattcttttgaaat

SEQ ID NO: 73817 - DNA, 15 bp, Homo sapiens
tattcttttgaaata

SEQ ID NO: 73818 - DNA, 15 bp, Homo sapiens
attcttttgaaatat

SEQ ID NO: 73819 - DNA, 15 bp, Homo sapiens
ttcttttgaaatatt

SEQ ID NO: 73820 - DNA, 15 bp, Homo sapiens
tcttttgaaatattt

SEQ ID NO: 73821 - DNA, 15 bp, Homo sapiens
cttttgaaatatttg

SEQ ID NO: 73822 - DNA, 15 bp, Homo sapiens
ttttgaaatatttga

SEQ ID NO: 73823 - DNA, 15 bp, Homo sapiens
tttgaaatatttgaa

SEQ ID NO: 73824 - DNA, 15 bp, Homo sapiens
ttgaaatatttgaaa

SEQ ID NO: 73825 - DNA, 15 bp, Homo sapiens
tgaaatatttgaaat

SEQ ID NO: 73826 - DNA, 15 bp, Homo sapiens
gaaatatttgaaata

SEQ ID NO: 73827 - DNA, 15 bp, Homo sapiens
aaatatttgaaatat

SEQ ID NO: 73828 - DNA, 15 bp, Homo sapiens
aatatttgaaatatg

SEQ ID NO: 73829 - DNA, 15 bp, Homo sapiens
atatttgaaatatgt

SEQ ID NO: 73830 - DNA, 15 bp, Homo sapiens
tatttgaaatatgtt

SEQ ID NO: 73831 - DNA, 15 bp, Homo sapiens
atttgaaatatgttg

SEQ ID NO: 73832 - DNA, 15 bp, Homo sapiens
tttgaaatatgttga

SEQ ID NO: 73833 - DNA, 15 bp, Homo sapiens
ttgaaatatgttgat

SEQ ID NO: 73834 - DNA, 15 bp, Homo sapiens
tgaaatatgttgatc

SEQ ID NO: 73835 - DNA, 15 bp, Homo sapiens
gaaatatgttgatct

SEQ ID NO: 73836 - DNA, 15 bp, Homo sapiens
aaatatgttgatctc

SEQ ID NO: 73837 - DNA, 15 bp, Homo sapiens
aatatgttgatctct

SEQ ID NO: 73838 - DNA, 15 bp, Homo sapiens
atatgttgatctctc

SEQ ID NO: 73839 - DNA, 15 bp, Homo sapiens
tatgttgatctctca

SEQ ID NO: 73840 - DNA, 15 bp, Homo sapiens
atgttgatctctcag

SEQ ID NO: 73841 - DNA, 15 bp, Homo sapiens
tgttgatctctcagt

SEQ ID NO: 73842 - DNA, 15 bp, Homo sapiens
gttgatctctcagtc

SEQ ID NO: 73843 - DNA, 15 bp, Homo sapiens
ttgatctctcagtct

SEQ ID NO: 73844 - DNA, 15 bp, Homo sapiens
tgatctctcagtctt

SEQ ID NO: 73845 - DNA, 15 bp, Homo sapiens
gatctctcagtcttt

SEQ ID NO: 73846 - DNA, 15 bp, Homo sapiens
atctctcagtctttc

SEQ ID NO: 73847 - DNA, 15 bp, Homo sapiens
tctctcagtctttca

SEQ ID NO: 73848 - DNA, 15 bp, Homo sapiens
ctctcagtctttcaa

SEQ ID NO: 73849 - DNA, 15 bp, Homo sapiens
tctcagtctttcaac

SEQ ID NO: 73850 - DNA, 15 bp, Homo sapiens
ctcagtctttcaacc

SEQ ID NO: 73851 - DNA, 15 bp, Homo sapiens
tcagtctttcaacct

SEQ ID NO: 73852 - DNA, 15 bp, Homo sapiens
cagtctttcaacctt

SEQ ID NO: 73853 - DNA, 15 bp, Homo sapiens
agtctttcaacctta

SEQ ID NO: 73854 - DNA, 15 bp, Homo sapiens
gtctttcaaccttag

SEQ ID NO: 73855 - DNA, 15 bp, Homo sapiens
tctttcaaccttagt

SEQ ID NO: 73856 - DNA, 15 bp, Homo sapiens
ctttcaaccttagtt

SEQ ID NO: 73857 - DNA, 15 bp, Homo sapiens
tttcaaccttagttg

SEQ ID NO: 73858 - DNA, 15 bp, Homo sapiens
ttcaaccttagttgt

SEQ ID NO: 73859 - DNA, 15 bp, Homo sapiens
tcaaccttagttgta

SEQ ID NO: 73860 - DNA, 15 bp, Homo sapiens
caaccttagttgtat

SEQ ID NO: 73861 - DNA, 15 bp, Homo sapiens
aaccttagttgtatg

SEQ ID NO: 73862 - DNA, 15 bp, Homo sapiens
accttagttgtatgt

SEQ ID NO: 73863 - DNA, 15 bp, Homo sapiens
ccttagttgtatgtt

SEQ ID NO: 73864 - DNA, 15 bp, Homo sapiens
cttagttgtatgttg

SEQ ID NO: 73865 - DNA, 15 bp, Homo sapiens
ttagttgtatgttga

SEQ ID NO: 73866 - DNA, 15 bp, Homo sapiens
tagttgtatgttgat

SEQ ID NO: 73867 - DNA, 15 bp, Homo sapiens
agttgtatgttgatt

SEQ ID NO: 73868 - DNA, 15 bp, Homo sapiens
gttgtatgttgattt

SEQ ID NO: 73869 - DNA, 15 bp, Homo sapiens
ttgtatgttgatttt

SEQ ID NO: 73870 - DNA, 15 bp, Homo sapiens
tgtatgttgattttc

SEQ ID NO: 73871 - DNA, 15 bp, Homo sapiens
gtatgttgattttca

SEQ ID NO: 73872 - DNA, 15 bp, Homo sapiens
tatgttgattttcaa

SEQ ID NO: 73873 - DNA, 15 bp, Homo sapiens
atgttgattttcaat

SEQ ID NO: 73874 - DNA, 15 bp, Homo sapiens
tgttgattttcaata

SEQ ID NO: 73875 - DNA, 15 bp, Homo sapiens
gttgattttcaataa

SEQ ID NO: 73876 - DNA, 15 bp, Homo sapiens
ttgattttcaataaa

SEQ ID NO: 73877 - DNA, 15 bp, Homo sapiens
tgattttcaataaaa

SEQ ID NO: 73878 - DNA, 15 bp, Homo sapiens
gattttcaataaaaa

SEQ ID NO: 73879 - DNA, 15 bp, Homo sapiens
attttcaataaaaag

SEQ ID NO: 73880 - DNA, 15 bp, Homo sapiens
ttttcaataaaaagg

SEQ ID NO: 73881 - DNA, 15 bp, Homo sapiens
tttcaataaaaagga

SEQ ID NO: 73882 - DNA, 15 bp, Homo sapiens
ttcaataaaaaggaa

SEQ ID NO: 73883 - DNA, 15 bp, Homo sapiens
tcaataaaaaggaag

SEQ ID NO: 73884 - DNA, 15 bp, Homo sapiens
caataaaaaggaagt

SEQ ID NO: 73885 - DNA, 15 bp, Homo sapiens
aataaaaaggaagta

SEQ ID NO: 73886 - DNA, 15 bp, Homo sapiens
ataaaaaggaagtat

SEQ ID NO: 73887 - DNA, 15 bp, Homo sapiens
taaaaaggaagtatt

SEQ ID NO: 73888 - DNA, 15 bp, Homo sapiens
aaaaaggaagtattt

SEQ ID NO: 73889 - DNA, 15 bp, Homo sapiens
aaaaggaagtatttg

SEQ ID NO: 73890 - DNA, 15 bp, Homo sapiens
aaaggaagtatttgt

SEQ ID NO: 73891 - DNA, 15 bp, Homo sapiens
aaggaagtatttgtt

SEQ ID NO: 73892 - DNA, 15 bp, Homo sapiens
aggaagtatttgttg

SEQ ID NO: 73893 - DNA, 15 bp, Homo sapiens
ggaagtatttgttgc

SEQ ID NO: 73894 - DNA, 15 bp, Homo sapiens
gaagtatttgttgcc

SEQ ID NO: 73895 - DNA, 15 bp, Homo sapiens
aagtatttgttgccc

SEQ ID NO: 73896 - DNA, 15 bp, Homo sapiens
agtatttgttgccct

SEQ ID NO: 73897 - DNA, 15 bp, Homo sapiens
gtatttgttgcccta

SEQ ID NO: 73898 - DNA, 15 bp, Homo sapiens
tatttgttgccctaa

SEQ ID NO: 73899 - DNA, 15 bp, Homo sapiens
atttgttgccctaac

SEQ ID NO: 73900 - DNA, 15 bp, Homo sapiens
tttgttgccctaaca

SEQ ID NO: 73901 - DNA, 15 bp, Homo sapiens
ttgttgccctaacat

SEQ ID NO: 73902 - DNA, 15 bp, Homo sapiens
tgttgccctaacatc

SEQ ID NO: 73903 - DNA, 15 bp, Homo sapiens
gttgccctaacatca

SEQ ID NO: 73904 - DNA, 15 bp, Homo sapiens
ttgccctaacatcag

SEQ ID NO: 73905 - DNA, 15 bp, Homo sapiens
tgccctaacatcagt

SEQ ID NO: 73906 - DNA, 15 bp, Homo sapiens
gccctaacatcagta

SEQ ID NO: 73907 - DNA, 15 bp, Homo sapiens
ccctaacatcagtat

SEQ ID NO: 73908 - DNA, 15 bp, Homo sapiens
cctaacatcagtatt

SEQ ID NO: 73909 - DNA, 15 bp, Homo sapiens
ctaacatcagtattg

SEQ ID NO: 73910 - DNA, 15 bp, Homo sapiens
taacatcagtattgg

SEQ ID NO: 73911 - DNA, 15 bp, Homo sapiens
aacatcagtattggc

SEQ ID NO: 73912 - DNA, 15 bp, Homo sapiens
acatcagtattggct

SEQ ID NO: 73913 - DNA, 15 bp, Homo sapiens
catcagtattggcta

SEQ ID NO: 73914 - DNA, 15 bp, Homo sapiens
atcagtattggctat

SEQ ID NO: 73915 - DNA, 15 bp, Homo sapiens
tcagtattggctatt

SEQ ID NO: 73916 - DNA, 15 bp, Homo sapiens
cagtattggctattc

SEQ ID NO: 73917 - DNA, 15 bp, Homo sapiens
agtattggctattca

SEQ ID NO: 73918 - DNA, 15 bp, Homo sapiens
gtattggctattcag

SEQ ID NO: 73919 - DNA, 15 bp, Homo sapiens
tattggctattcagt

SEQ ID NO: 73920 - DNA, 15 bp, Homo sapiens
attggctattcagtt

SEQ ID NO: 73921 - DNA, 15 bp, Homo sapiens
ttggctattcagttt

SEQ ID NO: 73922 - DNA, 15 bp, Homo sapiens
tggctattcagttta

SEQ ID NO: 73923 - DNA, 15 bp, Homo sapiens
ggctattcagtttaa

SEQ ID NO: 73924 - DNA, 15 bp, Homo sapiens
gctattcagtttaaa

SEQ ID NO: 73925 - DNA, 15 bp, Homo sapiens
ctattcagtttaaaa

SEQ ID NO: 73926 - DNA, 15 bp, Homo sapiens
tattcagtttaaaaa

SEQ ID NO: 73927 - DNA, 15 bp, Homo sapiens
attcagtttaaaaaa

SEQ ID NO: 73928 - DNA, 15 bp, Homo sapiens
ttcagtttaaaaaag

SEQ ID NO: 73929 - DNA, 15 bp, Homo sapiens
tcagtttaaaaaagg

SEQ ID NO: 73930 - DNA, 15 bp, Homo sapiens
cagtttaaaaaagga

SEQ ID NO: 73931 - DNA, 15 bp, Homo sapiens
agtttaaaaaaggag

SEQ ID NO: 73932 - DNA, 15 bp, Homo sapiens
gtttaaaaaaggagt

SEQ ID NO: 73933 - DNA, 15 bp, Homo sapiens
tttaaaaaaggagtt

SEQ ID NO: 73934 - DNA, 15 bp, Homo sapiens
ttaaaaaaggagtta

SEQ ID NO: 73935 - DNA, 15 bp, Homo sapiens
taaaaaaggagttaa

SEQ ID NO: 73936 - DNA, 15 bp, Homo sapiens
aaaaaaggagttaaa

SEQ ID NO: 73937 - DNA, 15 bp, Homo sapiens
aaaaaggagttaaag

SEQ ID NO: 73938 - DNA, 15 bp, Homo sapiens
aaaaggagttaaaga

SEQ ID NO: 73939 - DNA, 15 bp, Homo sapiens
aaaggagttaaagag

SEQ ID NO: 73940 - DNA, 15 bp, Homo sapiens
aaggagttaaagaga

SEQ ID NO: 73941 - DNA, 15 bp, Homo sapiens
aggagttaaagagat

SEQ ID NO: 73942 - DNA, 15 bp, Homo sapiens
ggagttaaagagatg

SEQ ID NO: 73943 - DNA, 15 bp, Homo sapiens
gagttaaagagatgt

SEQ ID NO: 73944 - DNA, 15 bp, Homo sapiens
agttaaagagatgtt

SEQ ID NO: 73945 - DNA, 15 bp, Homo sapiens
gttaaagagatgtta

SEQ ID NO: 73946 - DNA, 15 bp, Homo sapiens
ttaaagagatgttat

SEQ ID NO: 73947 - DNA, 15 bp, Homo sapiens
taaagagatgttatt

SEQ ID NO: 73948 - DNA, 15 bp, Homo sapiens
aaagagatgttattt

SEQ ID NO: 73949 - DNA, 15 bp, Homo sapiens
aagagatgttattta

SEQ ID NO: 73950 - DNA, 15 bp, Homo sapiens
agagatgttatttat

SEQ ID NO: 73951 - DNA, 15 bp, Homo sapiens
gagatgttatttata

SEQ ID NO: 73952 - DNA, 15 bp, Homo sapiens
agatgttatttatag

SEQ ID NO: 73953 - DNA, 15 bp, Homo sapiens
gatgttatttatagg

SEQ ID NO: 73954 - DNA, 15 bp, Homo sapiens
atgttatttataggc

SEQ ID NO: 73955 - DNA, 15 bp, Homo sapiens
tgttatttataggca

SEQ ID NO: 73956 - DNA, 15 bp, Homo sapiens
gttatttataggcag

SEQ ID NO: 73957 - DNA, 15 bp, Homo sapiens
ttatttataggcagg

SEQ ID NO: 73958 - DNA, 15 bp, Homo sapiens
tatttataggcaggc

SEQ ID NO: 73959 - DNA, 15 bp, Homo sapiens
atttataggcaggct

SEQ ID NO: 73960 - DNA, 15 bp, Homo sapiens
tttataggcaggctt

SEQ ID NO: 73961 - DNA, 15 bp, Homo sapiens
ttataggcaggcttc

SEQ ID NO: 73962 - DNA, 15 bp, Homo sapiens
tataggcaggcttca

SEQ ID NO: 73963 - DNA, 15 bp, Homo sapiens
ataggcaggcttcaa

SEQ ID NO: 73964 - DNA, 15 bp, Homo sapiens
taggcaggcttcaaa

SEQ ID NO: 73965 - DNA, 15 bp, Homo sapiens
aggcaggcttcaaaa

SEQ ID NO: 73966 - DNA, 15 bp, Homo sapiens
ggcaggcttcaaaag

SEQ ID NO: 73967 - DNA, 15 bp, Homo sapiens
gcaggcttcaaaaga

SEQ ID NO: 73968 - DNA, 15 bp, Homo sapiens
caggcttcaaaagag

SEQ ID NO: 73969 - DNA, 15 bp, Homo sapiens
aggcttcaaaagagg

SEQ ID NO: 73970 - DNA, 15 bp, Homo sapiens
ggcttcaaaagagga

SEQ ID NO: 73971 - DNA, 15 bp, Homo sapiens
gcttcaaaagaggaa

SEQ ID NO: 73972 - DNA, 15 bp, Homo sapiens
cttcaaaagaggaaa

SEQ ID NO: 73973 - DNA, 15 bp, Homo sapiens
ttcaaaagaggaaag

SEQ ID NO: 73974 - DNA, 15 bp, Homo sapiens
tcaaaagaggaaaga

SEQ ID NO: 73975 - DNA, 15 bp, Homo sapiens
caaaagaggaaagaa

SEQ ID NO: 73976 - DNA, 15 bp, Homo sapiens
aaaagaggaaagaat

SEQ ID NO: 73977 - DNA, 15 bp, Homo sapiens
aaagaggaaagaatg

SEQ ID NO: 73978 - DNA, 15 bp, Homo sapiens
aagaggaaagaatga

SEQ ID NO: 73979 - DNA, 15 bp, Homo sapiens
agaggaaagaatgat

SEQ ID NO: 73980 - DNA, 15 bp, Homo sapiens
gaggaaagaatgatc

SEQ ID NO: 73981 - DNA, 15 bp, Homo sapiens
aggaaagaatgatca

SEQ ID NO: 73982 - DNA, 15 bp, Homo sapiens
ggaaagaatgatcag

SEQ ID NO: 73983 - DNA, 15 bp, Homo sapiens
gaaagaatgatcagt

SEQ ID NO: 73984 - DNA, 15 bp, Homo sapiens
aaagaatgatcagtt

SEQ ID NO: 73985 - DNA, 15 bp, Homo sapiens
aagaatgatcagttt

SEQ ID NO: 73986 - DNA, 15 bp, Homo sapiens
agaatgatcagtttc

SEQ ID NO: 73987 - DNA, 15 bp, Homo sapiens
gaatgatcagtttca

SEQ ID NO: 73988 - DNA, 15 bp, Homo sapiens
aatgatcagtttcat

SEQ ID NO: 73989 - DNA, 15 bp, Homo sapiens
atgatcagtttcatt

SEQ ID NO: 73990 - DNA, 15 bp, Homo sapiens
tgatcagtttcattc

SEQ ID NO: 73991 - DNA, 15 bp, Homo sapiens
gatcagtttcattct

SEQ ID NO: 73992 - DNA, 15 bp, Homo sapiens
atcagtttcattctc

SEQ ID NO: 73993 - DNA, 15 bp, Homo sapiens
tcagtttcattctct

SEQ ID NO: 73994 - DNA, 15 bp, Homo sapiens
cagtttcattctctg

SEQ ID NO: 73995 - DNA, 15 bp, Homo sapiens
agtttcattctctgt

SEQ ID NO: 73996 - DNA, 15 bp, Homo sapiens
gtttcattctctgtt

SEQ ID NO: 73997 - DNA, 15 bp, Homo sapiens
tttcattctctgttt

SEQ ID NO: 73998 - DNA, 15 bp, Homo sapiens
ttcattctctgtttc

SEQ ID NO: 73999 - DNA, 15 bp, Homo sapiens
tcattctctgtttct

SEQ ID NO: 74000 - DNA, 15 bp, Homo sapiens
cattctctgtttcta

SEQ ID NO: 74001 - DNA, 15 bp, Homo sapiens
attctctgtttctag

SEQ ID NO: 74002 - DNA, 15 bp, Homo sapiens
ttctctgtttctagc

SEQ ID NO: 74003 - DNA, 15 bp, Homo sapiens
tctctgtttctagca

SEQ ID NO: 74004 - DNA, 15 bp, Homo sapiens
ctctgtttctagcat

SEQ ID NO: 74005 - DNA, 15 bp, Homo sapiens
tctgtttctagcata

SEQ ID NO: 74006 - DNA, 15 bp, Homo sapiens
ctgtttctagcatat

SEQ ID NO: 74007 - DNA, 15 bp, Homo sapiens
tgtttctagcatatt

SEQ ID NO: 74008 - DNA, 15 bp, Homo sapiens
gtttctagcatattc

SEQ ID NO: 74009 - DNA, 15 bp, Homo sapiens
tttctagcatattct

SEQ ID NO: 74010 - DNA, 15 bp, Homo sapiens
ttctagcatattctg

SEQ ID NO: 74011 - DNA, 15 bp, Homo sapiens
tctagcatattctga

SEQ ID NO: 74012 - DNA, 15 bp, Homo sapiens
ctagcatattctgac

SEQ ID NO: 74013 - DNA, 15 bp, Homo sapiens
tagcatattctgact

SEQ ID NO: 74014 - DNA, 15 bp, Homo sapiens
agcatattctgactc

SEQ ID NO: 74015 - DNA, 15 bp, Homo sapiens
gcatattctgactcc

SEQ ID NO: 74016 - DNA, 15 bp, Homo sapiens
catattctgactcct

SEQ ID NO: 74017 - DNA, 15 bp, Homo sapiens
atattctgactcctt

SEQ ID NO: 74018 - DNA, 15 bp, Homo sapiens
tattctgactccttc

SEQ ID NO: 74019 - DNA, 15 bp, Homo sapiens
attctgactccttct

SEQ ID NO: 74020 - DNA, 15 bp, Homo sapiens
ttctgactccttctc

SEQ ID NO: 74021 - DNA, 15 bp, Homo sapiens
tctgactccttctct

SEQ ID NO: 74022 - DNA, 15 bp, Homo sapiens
ctgactccttctctc

SEQ ID NO: 74023 - DNA, 15 bp, Homo sapiens
tgactccttctctca

SEQ ID NO: 74024 - DNA, 15 bp, Homo sapiens
gactccttctctcat

SEQ ID NO: 74025 - DNA, 15 bp, Homo sapiens
actccttctctcata

SEQ ID NO: 74026 - DNA, 15 bp, Homo sapiens
ctccttctctcatat

SEQ ID NO: 74027 - DNA, 15 bp, Homo sapiens
tccttctctcatatt

SEQ ID NO: 74028 - DNA, 15 bp, Homo sapiens
ccttctctcatatta

SEQ ID NO: 74029 - DNA, 15 bp, Homo sapiens
cttctctcatattac

SEQ ID NO: 74030 - DNA, 15 bp, Homo sapiens
ttctctcatattacc

SEQ ID NO: 74031 - DNA, 15 bp, Homo sapiens
tctctcatattacct

SEQ ID NO: 74032 - DNA, 15 bp, Homo sapiens
ctctcatattacctc

SEQ ID NO: 74033 - DNA, 15 bp, Homo sapiens
tctcatattacctcg

SEQ ID NO: 74034 - DNA, 15 bp, Homo sapiens
ctcatattacctcgt

SEQ ID NO: 74035 - DNA, 15 bp, Homo sapiens
tcatattacctcgtt

SEQ ID NO: 74036 - DNA, 15 bp, Homo sapiens
catattacctcgttt

SEQ ID NO: 74037 - DNA, 15 bp, Homo sapiens
atattacctcgtttt

SEQ ID NO: 74038 - DNA, 15 bp, Homo sapiens
tattacctcgttttt

SEQ ID NO: 74039 - DNA, 15 bp, Homo sapiens
attacctcgtttttc

SEQ ID NO: 74040 - DNA, 15 bp, Homo sapiens
ttacctcgtttttcc

SEQ ID NO: 74041 - DNA, 15 bp, Homo sapiens
tacctcgtttttccc

SEQ ID NO: 74042 - DNA, 15 bp, Homo sapiens
acctcgtttttccca

SEQ ID NO: 74043 - DNA, 15 bp, Homo sapiens
cctcgtttttcccac

SEQ ID NO: 74044 - DNA, 15 bp, Homo sapiens
ctcgtttttcccaca

SEQ ID NO: 74045 - DNA, 15 bp, Homo sapiens
tcgtttttcccacat

SEQ ID NO: 74046 - DNA, 15 bp, Homo sapiens
cgtttttcccacatt

SEQ ID NO: 74047 - DNA, 15 bp, Homo sapiens
gtttttcccacattt

SEQ ID NO: 74048 - DNA, 15 bp, Homo sapiens
tttttcccacatttt

SEQ ID NO: 74049 - DNA, 15 bp, Homo sapiens
ttttcccacattttt

SEQ ID NO: 74050 - DNA, 15 bp, Homo sapiens
tttcccacatttttt

SEQ ID NO: 74051 - DNA, 15 bp, Homo sapiens
ttcccacattttttc

SEQ ID NO: 74052 - DNA, 15 bp, Homo sapiens
tcccacattttttct

SEQ ID NO: 74053 - DNA, 15 bp, Homo sapiens
cccacattttttctt

SEQ ID NO: 74054 - DNA, 15 bp, Homo sapiens
ccacattttttcttt

SEQ ID NO: 74055 - DNA, 15 bp, Homo sapiens
cacattttttcttta

SEQ ID NO: 74056 - DNA, 15 bp, Homo sapiens
acattttttctttaa

SEQ ID NO: 74057 - DNA, 15 bp, Homo sapiens
cattttttctttaat

SEQ ID NO: 74058 - DNA, 15 bp, Homo sapiens
attttttctttaata

SEQ ID NO: 74059 - DNA, 15 bp, Homo sapiens
ttttttctttaataa

SEQ ID NO: 74060 - DNA, 15 bp, Homo sapiens
tttttctttaataaa

SEQ ID NO: 74061 - DNA, 15 bp, Homo sapiens
ttttctttaataaag

SEQ ID NO: 74062 - DNA, 15 bp, Homo sapiens
tttctttaataaagt

SEQ ID NO: 74063 - DNA, 15 bp, Homo sapiens
ttctttaataaagtg

SEQ ID NO: 74064 - DNA, 15 bp, Homo sapiens
tctttaataaagtga

SEQ ID NO: 74065 - DNA, 15 bp, Homo sapiens
ctttaataaagtgaa

SEQ ID NO: 74066 - DNA, 15 bp, Homo sapiens
tttaataaagtgaaa

SEQ ID NO: 74067 - DNA, 15 bp, Homo sapiens
ttaataaagtgaaat

SEQ ID NO: 74068 - DNA, 15 bp, Homo sapiens
taataaagtgaaatt

SEQ ID NO: 74069 - DNA, 15 bp, Homo sapiens
aataaagtgaaattc

SEQ ID NO: 74070 - DNA, 15 bp, Homo sapiens
ataaagtgaaattca

SEQ ID NO: 74071 - DNA, 15 bp, Homo sapiens
taaagtgaaattcac

SEQ ID NO: 74072 - DNA, 15 bp, Homo sapiens
aaagtgaaattcaca

SEQ ID NO: 74073 - DNA, 15 bp, Homo sapiens
aagtgaaattcacat

SEQ ID NO: 74074 - DNA, 15 bp, Homo sapiens
agtgaaattcacata

SEQ ID NO: 74075 - DNA, 15 bp, Homo sapiens
gtgaaattcacataa

SEQ ID NO: 74076 - DNA, 15 bp, Homo sapiens
tgaaattcacataac

SEQ ID NO: 74077 - DNA, 15 bp, Homo sapiens
gaaattcacataaca

SEQ ID NO: 74078 - DNA, 15 bp, Homo sapiens
aaattcacataacag

SEQ ID NO: 74079 - DNA, 15 bp, Homo sapiens
aattcacataacagc

SEQ ID NO: 74080 - DNA, 15 bp, Homo sapiens
attcacataacagct

SEQ ID NO: 74081 - DNA, 15 bp, Homo sapiens
ttcacataacagcta

SEQ ID NO: 74082 - DNA, 15 bp, Homo sapiens
tcacataacagctaa

SEQ ID NO: 74083 - DNA, 15 bp, Homo sapiens
cacataacagctaac

SEQ ID NO: 74084 - DNA, 15 bp, Homo sapiens
acataacagctaacc

SEQ ID NO: 74085 - DNA, 15 bp, Homo sapiens
cataacagctaacca

SEQ ID NO: 74086 - DNA, 15 bp, Homo sapiens
ataacagctaaccat

SEQ ID NO: 74087 - DNA, 15 bp, Homo sapiens
taacagctaaccatt

SEQ ID NO: 74088 - DNA, 15 bp, Homo sapiens
aacagctaaccattt

SEQ ID NO: 74089 - DNA, 15 bp, Homo sapiens
acagctaaccatttt

SEQ ID NO: 74090 - DNA, 15 bp, Homo sapiens
cagctaaccatttta

SEQ ID NO: 74091 - DNA, 15 bp, Homo sapiens
agctaaccattttaa

SEQ ID NO: 74092 - DNA, 15 bp, Homo sapiens
gctaaccattttaac

SEQ ID NO: 74093 - DNA, 15 bp, Homo sapiens
ctaaccattttaacc

SEQ ID NO: 74094 - DNA, 15 bp, Homo sapiens
taaccattttaacca

SEQ ID NO: 74095 - DNA, 15 bp, Homo sapiens
aaccattttaaccac

SEQ ID NO: 74096 - DNA, 15 bp, Homo sapiens
accattttaaccacg

SEQ ID NO: 74097 - DNA, 15 bp, Homo sapiens
ccattttaaccacgg

SEQ ID NO: 74098 - DNA, 15 bp, Homo sapiens
cattttaaccacgga

SEQ ID NO: 74099 - DNA, 15 bp, Homo sapiens
attttaaccacggaa

SEQ ID NO: 74100 - DNA, 15 bp, Homo sapiens
ttttaaccacggaaa

SEQ ID NO: 74101 - DNA, 15 bp, Homo sapiens
tttaaccacggaaag

SEQ ID NO: 74102 - DNA, 15 bp, Homo sapiens
ttaaccacggaaagt

SEQ ID NO: 74103 - DNA, 15 bp, Homo sapiens
taaccacggaaagtg

SEQ ID NO: 74104 - DNA, 15 bp, Homo sapiens
aaccacggaaagtgt

SEQ ID NO: 74105 - DNA, 15 bp, Homo sapiens
accacggaaagtgta

SEQ ID NO: 74106 - DNA, 15 bp, Homo sapiens
ccacggaaagtgtac

SEQ ID NO: 74107 - DNA, 15 bp, Homo sapiens
cacggaaagtgtaca

SEQ ID NO: 74108 - DNA, 15 bp, Homo sapiens
acggaaagtgtacat

SEQ ID NO: 74109 - DNA, 15 bp, Homo sapiens
cggaaagtgtacatt

SEQ ID NO: 74110 - DNA, 15 bp, Homo sapiens
ggaaagtgtacattc

SEQ ID NO: 74111 - DNA, 15 bp, Homo sapiens
gaaagtgtacattcc

SEQ ID NO: 74112 - DNA, 15 bp, Homo sapiens
aaagtgtacattccg

SEQ ID NO: 74113 - DNA, 15 bp, Homo sapiens
aagtgtacattccgt

SEQ ID NO: 74114 - DNA, 15 bp, Homo sapiens
agtgtacattccgtg

SEQ ID NO: 74115 - DNA, 15 bp, Homo sapiens
gtgtacattccgtgg

SEQ ID NO: 74116 - DNA, 15 bp, Homo sapiens
tgtacattccgtggc

SEQ ID NO: 74117 - DNA, 15 bp, Homo sapiens
gtacattccgtggca

SEQ ID NO: 74118 - DNA, 15 bp, Homo sapiens
tacattccgtggcat

SEQ ID NO: 74119 - DNA, 15 bp, Homo sapiens
acattccgtggcatt

SEQ ID NO: 74120 - DNA, 15 bp, Homo sapiens
cattccgtggcattt

SEQ ID NO: 74121 - DNA, 15 bp, Homo sapiens
attccgtggcattta

SEQ ID NO: 74122 - DNA, 15 bp, Homo sapiens
ttccgtggcatttat

SEQ ID NO: 74123 - DNA, 15 bp, Homo sapiens
tccgtggcatttatt

SEQ ID NO: 74124 - DNA, 15 bp, Homo sapiens
ccgtggcatttatta

SEQ ID NO: 74125 - DNA, 15 bp, Homo sapiens
cgtggcatttattac

SEQ ID NO: 74126 - DNA, 15 bp, Homo sapiens
gtggcatttattacc

SEQ ID NO: 74127 - DNA, 15 bp, Homo sapiens
tggcatttattacct

SEQ ID NO: 74128 - DNA, 15 bp, Homo sapiens
ggcatttattacctt

SEQ ID NO: 74129 - DNA, 15 bp, Homo sapiens
gcatttattaccttc

SEQ ID NO: 74130 - DNA, 15 bp, Homo sapiens
catttattaccttca

SEQ ID NO: 74131 - DNA, 15 bp, Homo sapiens
atttattaccttcac

SEQ ID NO: 74132 - DNA, 15 bp, Homo sapiens
tttattaccttcaca

SEQ ID NO: 74133 - DNA, 15 bp, Homo sapiens
ttattaccttcacag

SEQ ID NO: 74134 - DNA, 15 bp, Homo sapiens
tattaccttcacagt

SEQ ID NO: 74135 - DNA, 15 bp, Homo sapiens
attaccttcacagtg

SEQ ID NO: 74136 - DNA, 15 bp, Homo sapiens
ttaccttcacagtgt

SEQ ID NO: 74137 - DNA, 15 bp, Homo sapiens
taccttcacagtgtt

SEQ ID NO: 74138 - DNA, 15 bp, Homo sapiens
accttcacagtgtta

SEQ ID NO: 74139 - DNA, 15 bp, Homo sapiens
ccttcacagtgttac

SEQ ID NO: 74140 - DNA, 15 bp, Homo sapiens
cttcacagtgttacc

SEQ ID NO: 74141 - DNA, 15 bp, Homo sapiens
ttcacagtgttacct

SEQ ID NO: 74142 - DNA, 15 bp, Homo sapiens
tcacagtgttacctc

SEQ ID NO: 74143 - DNA, 15 bp, Homo sapiens
cacagtgttacctct

SEQ ID NO: 74144 - DNA, 15 bp, Homo sapiens
acagtgttacctcta

SEQ ID NO: 74145 - DNA, 15 bp, Homo sapiens
cagtgttacctctac

SEQ ID NO: 74146 - DNA, 15 bp, Homo sapiens
agtgttacctctacc

SEQ ID NO: 74147 - DNA, 15 bp, Homo sapiens
gtgttacctctacct

SEQ ID NO: 74148 - DNA, 15 bp, Homo sapiens
tgttacctctacctt

SEQ ID NO: 74149 - DNA, 15 bp, Homo sapiens
gttacctctaccttt

SEQ ID NO: 74150 - DNA, 15 bp, Homo sapiens
ttacctctaccttta

SEQ ID NO: 74151 - DNA, 15 bp, Homo sapiens
tacctctacctttat

SEQ ID NO: 74152 - DNA, 15 bp, Homo sapiens
acctctacctttatc

SEQ ID NO: 74153 - DNA, 15 bp, Homo sapiens
cctctacctttatca

SEQ ID NO: 74154 - DNA, 15 bp, Homo sapiens
ctctacctttatcaa

SEQ ID NO: 74155 - DNA, 15 bp, Homo sapiens
tctacctttatcaag

SEQ ID NO: 74156 - DNA, 15 bp, Homo sapiens
ctacctttatcaagt

SEQ ID NO: 74157 - DNA, 15 bp, Homo sapiens
tacctttatcaagtt

SEQ ID NO: 74158 - DNA, 15 bp, Homo sapiens
acctttatcaagttt

SEQ ID NO: 74159 - DNA, 15 bp, Homo sapiens
cctttatcaagtttc

SEQ ID NO: 74160 - DNA, 15 bp, Homo sapiens
ctttatcaagtttca

SEQ ID NO: 74161 - DNA, 15 bp, Homo sapiens
tttatcaagtttcaa

SEQ ID NO: 74162 - DNA, 15 bp, Homo sapiens
ttatcaagtttcaaa

SEQ ID NO: 74163 - DNA, 15 bp, Homo sapiens
tatcaagtttcaaaa

SEQ ID NO: 74164 - DNA, 15 bp, Homo sapiens
atcaagtttcaaaac

SEQ ID NO: 74165 - DNA, 15 bp, Homo sapiens
tcaagtttcaaaaca

SEQ ID NO: 74166 - DNA, 15 bp, Homo sapiens
caagtttcaaaacat

SEQ ID NO: 74167 - DNA, 15 bp, Homo sapiens
aagtttcaaaacatt

SEQ ID NO: 74168 - DNA, 15 bp, Homo sapiens
agtttcaaaacattt

SEQ ID NO: 74169 - DNA, 15 bp, Homo sapiens
gtttcaaaacatttt

SEQ ID NO: 74170 - DNA, 15 bp, Homo sapiens
tttcaaaacatttta

SEQ ID NO: 74171 - DNA, 15 bp, Homo sapiens
ttcaaaacattttat

SEQ ID NO: 74172 - DNA, 15 bp, Homo sapiens
tcaaaacattttatc

SEQ ID NO: 74173 - DNA, 15 bp, Homo sapiens
caaaacattttatca

SEQ ID NO: 74174 - DNA, 15 bp, Homo sapiens
aaaacattttatcac

SEQ ID NO: 74175 - DNA, 15 bp, Homo sapiens
aaacattttatcacc

SEQ ID NO: 74176 - DNA, 15 bp, Homo sapiens
aacattttatcaccc

SEQ ID NO: 74177 - DNA, 15 bp, Homo sapiens
acattttatcacccc

SEQ ID NO: 74178 - DNA, 15 bp, Homo sapiens
cattttatcacccca

SEQ ID NO: 74179 - DNA, 15 bp, Homo sapiens
attttatcaccccaa

SEQ ID NO: 74180 - DNA, 15 bp, Homo sapiens
ttttatcaccccaaa

SEQ ID NO: 74181 - DNA, 15 bp, Homo sapiens
tttatcaccccaaaa

SEQ ID NO: 74182 - DNA, 15 bp, Homo sapiens
ttatcaccccaaaag

SEQ ID NO: 74183 - DNA, 15 bp, Homo sapiens
tatcaccccaaaaga

SEQ ID NO: 74184 - DNA, 15 bp, Homo sapiens
atcaccccaaaagaa

SEQ ID NO: 74185 - DNA, 15 bp, Homo sapiens
tcaccccaaaagaaa

SEQ ID NO: 74186 - DNA, 15 bp, Homo sapiens
caccccaaaagaaag

SEQ ID NO: 74187 - DNA, 15 bp, Homo sapiens
accccaaaagaaagc

SEQ ID NO: 74188 - DNA, 15 bp, Homo sapiens
ccccaaaagaaagcc

SEQ ID NO: 74189 - DNA, 15 bp, Homo sapiens
cccaaaagaaagccc

SEQ ID NO: 74190 - DNA, 15 bp, Homo sapiens
ccaaaagaaagccct

SEQ ID NO: 74191 - DNA, 15 bp, Homo sapiens
caaaagaaagccctg

SEQ ID NO: 74192 - DNA, 15 bp, Homo sapiens
aaaagaaagccctgt

SEQ ID NO: 74193 - DNA, 15 bp, Homo sapiens
aaagaaagccctgtt

SEQ ID NO: 74194 - DNA, 15 bp, Homo sapiens
aagaaagccctgttc

SEQ ID NO: 74195 - DNA, 15 bp, Homo sapiens
agaaagccctgttct

SEQ ID NO: 74196 - DNA, 15 bp, Homo sapiens
gaaagccctgttctt

SEQ ID NO: 74197 - DNA, 15 bp, Homo sapiens
aaagccctgttctta

SEQ ID NO: 74198 - DNA, 15 bp, Homo sapiens
aagccctgttcttat

SEQ ID NO: 74199 - DNA, 15 bp, Homo sapiens
agccctgttcttatt

SEQ ID NO: 74200 - DNA, 15 bp, Homo sapiens
gccctgttcttattg

SEQ ID NO: 74201 - DNA, 15 bp, Homo sapiens
ccctgttcttattgg

SEQ ID NO: 74202 - DNA, 15 bp, Homo sapiens
cctgttcttattggg

SEQ ID NO: 74203 - DNA, 15 bp, Homo sapiens
ctgttcttattgggt

SEQ ID NO: 74204 - DNA, 15 bp, Homo sapiens
tgttcttattgggtg

SEQ ID NO: 74205 - DNA, 15 bp, Homo sapiens
gttcttattgggtgc

SEQ ID NO: 74206 - DNA, 15 bp, Homo sapiens
ttcttattgggtgcc

SEQ ID NO: 74207 - DNA, 15 bp, Homo sapiens
tcttattgggtgcct

SEQ ID NO: 74208 - DNA, 15 bp, Homo sapiens
cttattgggtgcctc

SEQ ID NO: 74209 - DNA, 15 bp, Homo sapiens
ttattgggtgcctct

SEQ ID NO: 74210 - DNA, 15 bp, Homo sapiens
tattgggtgcctctt

SEQ ID NO: 74211 - DNA, 15 bp, Homo sapiens
attgggtgcctcttg

SEQ ID NO: 74212 - DNA, 15 bp, Homo sapiens
ttgggtgcctcttgc

SEQ ID NO: 74213 - DNA, 15 bp, Homo sapiens
tgggtgcctcttgct

SEQ ID NO: 74214 - DNA, 15 bp, Homo sapiens
gggtgcctcttgctt

SEQ ID NO: 74215 - DNA, 15 bp, Homo sapiens
ggtgcctcttgcttt

SEQ ID NO: 74216 - DNA, 15 bp, Homo sapiens
gtgcctcttgctttt

SEQ ID NO: 74217 - DNA, 15 bp, Homo sapiens
tgcctcttgcttttt

SEQ ID NO: 74218 - DNA, 15 bp, Homo sapiens
gcctcttgctttttt

SEQ ID NO: 74219 - DNA, 15 bp, Homo sapiens
cctcttgcttttttt

SEQ ID NO: 74220 - DNA, 15 bp, Homo sapiens
ctcttgctttttttt

SEQ ID NO: 74221 - DNA, 15 bp, Homo sapiens
tcttgcttttttttt

SEQ ID NO: 74222 - DNA, 15 bp, Homo sapiens
cttgctttttttttt

SEQ ID NO: 74223 - DNA, 15 bp, Homo sapiens
ttgcttttttttttt

SEQ ID NO: 74224 - DNA, 15 bp, Homo sapiens
tgctttttttttttt

SEQ ID NO: 74225 - DNA, 15 bp, Homo sapiens
gcttttttttttttt

SEQ ID NO: 74226 - DNA, 15 bp, Homo sapiens
tttttttttttaaat

SEQ ID NO: 74227 - DNA, 15 bp, Homo sapiens
ttttttttttaaatc

SEQ ID NO: 74228 - DNA, 15 bp, Homo sapiens
tttttttttaaatct

SEQ ID NO: 74229 - DNA, 15 bp, Homo sapiens
ttttttttaaatctt

SEQ ID NO: 74230 - DNA, 15 bp, Homo sapiens
tttttttaaatcttg

SEQ ID NO: 74231 - DNA, 15 bp, Homo sapiens
ttttttaaatcttga

SEQ ID NO: 74232 - DNA, 15 bp, Homo sapiens
tttttaaatcttgag

SEQ ID NO: 74233 - DNA, 15 bp, Homo sapiens
ttttaaatcttgaga

SEQ ID NO: 74234 - DNA, 15 bp, Homo sapiens
tttaaatcttgagac

SEQ ID NO: 74235 - DNA, 15 bp, Homo sapiens
ttaaatcttgagacg

SEQ ID NO: 74236 - DNA, 15 bp, Homo sapiens
taaatcttgagacgg

SEQ ID NO: 74237 - DNA, 15 bp, Homo sapiens
aaatcttgagacggg

SEQ ID NO: 74238 - DNA, 15 bp, Homo sapiens
aatcttgagacgggg

SEQ ID NO: 74239 - DNA, 15 bp, Homo sapiens
atcttgagacggggt

SEQ ID NO: 74240 - DNA, 15 bp, Homo sapiens
tcttgagacggggtc

SEQ ID NO: 74241 - DNA, 15 bp, Homo sapiens
cttgagacggggtct

SEQ ID NO: 74242 - DNA, 15 bp, Homo sapiens
ttgagacggggtctt

SEQ ID NO: 74243 - DNA, 15 bp, Homo sapiens
tgagacggggtcttg

SEQ ID NO: 74244 - DNA, 15 bp, Homo sapiens
gagacggggtcttgg

SEQ ID NO: 74245 - DNA, 15 bp, Homo sapiens
agacggggtcttggt

SEQ ID NO: 74246 - DNA, 15 bp, Homo sapiens
gacggggtcttggtt

SEQ ID NO: 74247 - DNA, 15 bp, Homo sapiens
acggggtcttggttt

SEQ ID NO: 74248 - DNA, 15 bp, Homo sapiens
cggggtcttggtttg

SEQ ID NO: 74249 - DNA, 15 bp, Homo sapiens
ggggtcttggtttgt

SEQ ID NO: 74250 - DNA, 15 bp, Homo sapiens
gggtcttggtttgtt

SEQ ID NO: 74251 - DNA, 15 bp, Homo sapiens
ggtcttggtttgttt

SEQ ID NO: 74252 - DNA, 15 bp, Homo sapiens
gtcttggtttgtttc

SEQ ID NO: 74253 - DNA, 15 bp, Homo sapiens
tcttggtttgtttcc

SEQ ID NO: 74254 - DNA, 15 bp, Homo sapiens
cttggtttgtttccc

SEQ ID NO: 74255 - DNA, 15 bp, Homo sapiens
ttggtttgtttccca

SEQ ID NO: 74256 - DNA, 15 bp, Homo sapiens
tggtttgtttcccag

SEQ ID NO: 74257 - DNA, 15 bp, Homo sapiens
ggtttgtttcccagg

SEQ ID NO: 74258 - DNA, 15 bp, Homo sapiens
gtttgtttcccaggt

SEQ ID NO: 74259 - DNA, 15 bp, Homo sapiens
tttgtttcccaggtt

SEQ ID NO: 74260 - DNA, 15 bp, Homo sapiens
ttgtttcccaggttg

SEQ ID NO: 74261 - DNA, 15 bp, Homo sapiens
tgtttcccaggttgt

SEQ ID NO: 74262 - DNA, 15 bp, Homo sapiens
gtttcccaggttgta

SEQ ID NO: 74263 - DNA, 15 bp, Homo sapiens
tttcccaggttgtag

SEQ ID NO: 74264 - DNA, 15 bp, Homo sapiens
ttcccaggttgtagt

SEQ ID NO: 74265 - DNA, 15 bp, Homo sapiens
tcccaggttgtagtg

SEQ ID NO: 74266 - DNA, 15 bp, Homo sapiens
cccaggttgtagtgc

SEQ ID NO: 74267 - DNA, 15 bp, Homo sapiens
ccaggttgtagtgca

SEQ ID NO: 74268 - DNA, 15 bp, Homo sapiens
caggttgtagtgcaa

SEQ ID NO: 74269 - DNA, 15 bp, Homo sapiens
aggttgtagtgcaat

SEQ ID NO: 74270 - DNA, 15 bp, Homo sapiens
ggttgtagtgcaatg

SEQ ID NO: 74271 - DNA, 15 bp, Homo sapiens
gttgtagtgcaatgg

SEQ ID NO: 74272 - DNA, 15 bp, Homo sapiens
ttgtagtgcaatggg

SEQ ID NO: 74273 - DNA, 15 bp, Homo sapiens
tgtagtgcaatgggg

SEQ ID NO: 74274 - DNA, 15 bp, Homo sapiens
gtagtgcaatggggc

SEQ ID NO: 74275 - DNA, 15 bp, Homo sapiens
tagtgcaatggggcg

SEQ ID NO: 74276 - DNA, 15 bp, Homo sapiens
agtgcaatggggcga

SEQ ID NO: 74277 - DNA, 15 bp, Homo sapiens
gtgcaatggggcgat

SEQ ID NO: 74278 - DNA, 15 bp, Homo sapiens
tgcaatggggcgatc

SEQ ID NO: 74279 - DNA, 15 bp, Homo sapiens
gcaatggggcgatct

SEQ ID NO: 74280 - DNA, 15 bp, Homo sapiens
caatggggcgatctc

SEQ ID NO: 74281 - DNA, 15 bp, Homo sapiens
aatggggcgatctca

SEQ ID NO: 74282 - DNA, 15 bp, Homo sapiens
atggggcgatctcat

SEQ ID NO: 74283 - DNA, 15 bp, Homo sapiens
tggggcgatctcatc

SEQ ID NO: 74284 - DNA, 15 bp, Homo sapiens
ggggcgatctcatct

SEQ ID NO: 74285 - DNA, 15 bp, Homo sapiens
gggcgatctcatctc

SEQ ID NO: 74286 - DNA, 15 bp, Homo sapiens
ggcgatctcatctca

SEQ ID NO: 74287 - DNA, 15 bp, Homo sapiens
gcgatctcatctcat

SEQ ID NO: 74288 - DNA, 15 bp, Homo sapiens
cgatctcatctcatt

SEQ ID NO: 74289 - DNA, 15 bp, Homo sapiens
gatctcatctcattg

SEQ ID NO: 74290 - DNA, 15 bp, Homo sapiens
atctcatctcattgc

SEQ ID NO: 74291 - DNA, 15 bp, Homo sapiens
tctcatctcattgca

SEQ ID NO: 74292 - DNA, 15 bp, Homo sapiens
ctcatctcattgcaa

SEQ ID NO: 74293 - DNA, 15 bp, Homo sapiens
tcatctcattgcaac

SEQ ID NO: 74294 - DNA, 15 bp, Homo sapiens
catctcattgcaacc

SEQ ID NO: 74295 - DNA, 15 bp, Homo sapiens
atctcattgcaacct

SEQ ID NO: 74296 - DNA, 15 bp, Homo sapiens
tctcattgcaacctc

SEQ ID NO: 74297 - DNA, 15 bp, Homo sapiens
ctcattgcaacctct

SEQ ID NO: 74298 - DNA, 15 bp, Homo sapiens
tcattgcaacctctg

SEQ ID NO: 74299 - DNA, 15 bp, Homo sapiens
cattgcaacctctgc

SEQ ID NO: 74300 - DNA, 15 bp, Homo sapiens
attgcaacctctgcc

SEQ ID NO: 74301 - DNA, 15 bp, Homo sapiens
ttgcaacctctgcct

SEQ ID NO: 74302 - DNA, 15 bp, Homo sapiens
acctctgcctcccga

SEQ ID NO: 74303 - DNA, 15 bp, Homo sapiens
cctctgcctcccgag

SEQ ID NO: 74304 - DNA, 15 bp, Homo sapiens
ctctgcctcccgagt

SEQ ID NO: 74305 - DNA, 15 bp, Homo sapiens
tctgcctcccgagtt

SEQ ID NO: 74306 - DNA, 15 bp, Homo sapiens
ctgcctcccgagttc

SEQ ID NO: 74307 - DNA, 15 bp, Homo sapiens
tgcctcccgagttca

SEQ ID NO: 74308 - DNA, 15 bp, Homo sapiens
gcctcccgagttcaa

SEQ ID NO: 74309 - DNA, 15 bp, Homo sapiens
tcccgagttcaagca

SEQ ID NO: 74310 - DNA, 15 bp, Homo sapiens
cccgagttcaagcaa

SEQ ID NO: 74311 - DNA, 15 bp, Homo sapiens
ccgagttcaagcaat

SEQ ID NO: 74312 - DNA, 15 bp, Homo sapiens
cgagttcaagcaatt

SEQ ID NO: 74313 - DNA, 15 bp, Homo sapiens
gagttcaagcaattc

SEQ ID NO: 74314 - DNA, 15 bp, Homo sapiens
agttcaagcaattct

SEQ ID NO: 74315 - DNA, 15 bp, Homo sapiens
ttcaagcaattctcc

SEQ ID NO: 74316 - DNA, 15 bp, Homo sapiens
tcaagcaattctcct

SEQ ID NO: 74317 - DNA, 15 bp, Homo sapiens
caagcaattctcctg

SEQ ID NO: 74318 - DNA, 15 bp, Homo sapiens
aagcaattctcctgc

SEQ ID NO: 74319 - DNA, 15 bp, Homo sapiens
agcaattctcctgcc

SEQ ID NO: 74320 - DNA, 15 bp, Homo sapiens
gcaattctcctgcct

SEQ ID NO: 74321 - DNA, 15 bp, Homo sapiens
caattctcctgcctc

SEQ ID NO: 74322 - DNA, 15 bp, Homo sapiens
aattctcctgcctca

SEQ ID NO: 74323 - DNA, 15 bp, Homo sapiens
gcctcagcctcccgt

SEQ ID NO: 74324 - DNA, 15 bp, Homo sapiens
cctcagcctcccgta

SEQ ID NO: 74325 - DNA, 15 bp, Homo sapiens
ctcagcctcccgtag

SEQ ID NO: 74326 - DNA, 15 bp, Homo sapiens
tcagcctcccgtagc

SEQ ID NO: 74327 - DNA, 15 bp, Homo sapiens
cagcctcccgtagct

SEQ ID NO: 74328 - DNA, 15 bp, Homo sapiens
agcctcccgtagctg

SEQ ID NO: 74329 - DNA, 15 bp, Homo sapiens
gcctcccgtagctgg

SEQ ID NO: 74330 - DNA, 15 bp, Homo sapiens
cctcccgtagctggg

SEQ ID NO: 74331 - DNA, 15 bp, Homo sapiens
ctcccgtagctggga

SEQ ID NO: 74332 - DNA, 15 bp, Homo sapiens
tcccgtagctgggac

SEQ ID NO: 74333 - DNA, 15 bp, Homo sapiens
cccgtagctgggact

SEQ ID NO: 74334 - DNA, 15 bp, Homo sapiens
ccgtagctgggacta

SEQ ID NO: 74335 - DNA, 15 bp, Homo sapiens
cgtagctgggactac

SEQ ID NO: 74336 - DNA, 15 bp, Homo sapiens
gactacaggcacgcg

SEQ ID NO: 74337 - DNA, 15 bp, Homo sapiens
actacaggcacgcgc

SEQ ID NO: 74338 - DNA, 15 bp, Homo sapiens
ctacaggcacgcgcc

SEQ ID NO: 74339 - DNA, 15 bp, Homo sapiens
caggcacgcgccaca

SEQ ID NO: 74340 - DNA, 15 bp, Homo sapiens
aggcacgcgccacat

SEQ ID NO: 74341 - DNA, 15 bp, Homo sapiens
ggcacgcgccacatg

SEQ ID NO: 74342 - DNA, 15 bp, Homo sapiens
gcacgcgccacatgc

SEQ ID NO: 74343 - DNA, 15 bp, Homo sapiens
cacgcgccacatgcc

SEQ ID NO: 74344 - DNA, 15 bp, Homo sapiens
acgcgccacatgcct

SEQ ID NO: 74345 - DNA, 15 bp, Homo sapiens
cgcgccacatgcctg

SEQ ID NO: 74346 - DNA, 15 bp, Homo sapiens
gcgccacatgcctgg

SEQ ID NO: 74347 - DNA, 15 bp, Homo sapiens
cgccacatgcctggc

SEQ ID NO: 74348 - DNA, 15 bp, Homo sapiens
gccacatgcctggct

SEQ ID NO: 74349 - DNA, 15 bp, Homo sapiens
ccacatgcctggcta

SEQ ID NO: 74350 - DNA, 15 bp, Homo sapiens
cacatgcctggctaa

SEQ ID NO: 74351 - DNA, 15 bp, Homo sapiens
acatgcctggctaat

SEQ ID NO: 74352 - DNA, 15 bp, Homo sapiens
catgcctggctaatt

SEQ ID NO: 74353 - DNA, 15 bp, Homo sapiens
atgcctggctaattt

SEQ ID NO: 74354 - DNA, 15 bp, Homo sapiens
tgcctggctaatttt

SEQ ID NO: 74355 - DNA, 15 bp, Homo sapiens
ggctaatttttgtat

SEQ ID NO: 74356 - DNA, 15 bp, Homo sapiens
gtatttttagtagaa

SEQ ID NO: 74357 - DNA, 15 bp, Homo sapiens
tatttttagtagaaa

SEQ ID NO: 74358 - DNA, 15 bp, Homo sapiens
atttttagtagaaac

SEQ ID NO: 74359 - DNA, 15 bp, Homo sapiens
tttttagtagaaacg

SEQ ID NO: 74360 - DNA, 15 bp, Homo sapiens
ttttagtagaaacgt

SEQ ID NO: 74361 - DNA, 15 bp, Homo sapiens
tttagtagaaacgtg

SEQ ID NO: 74362 - DNA, 15 bp, Homo sapiens
ttagtagaaacgtgg

SEQ ID NO: 74363 - DNA, 15 bp, Homo sapiens
tagtagaaacgtggt

SEQ ID NO: 74364 - DNA, 15 bp, Homo sapiens
agtagaaacgtggtt

SEQ ID NO: 74365 - DNA, 15 bp, Homo sapiens
gtagaaacgtggttt

SEQ ID NO: 74366 - DNA, 15 bp, Homo sapiens
tagaaacgtggtttc

SEQ ID NO: 74367 - DNA, 15 bp, Homo sapiens
agaaacgtggtttca

SEQ ID NO: 74368 - DNA, 15 bp, Homo sapiens
gaaacgtggtttcac

SEQ ID NO: 74369 - DNA, 15 bp, Homo sapiens
aaacgtggtttcacc

SEQ ID NO: 74370 - DNA, 15 bp, Homo sapiens
aacgtggtttcacca

SEQ ID NO: 74371 - DNA, 15 bp, Homo sapiens
acgtggtttcaccat

SEQ ID NO: 74372 - DNA, 15 bp, Homo sapiens
cgtggtttcaccatg

SEQ ID NO: 74373 - DNA, 15 bp, Homo sapiens
gtggtttcaccatgt

SEQ ID NO: 74374 - DNA, 15 bp, Homo sapiens
tggtttcaccatgtt

SEQ ID NO: 74375 - DNA, 15 bp, Homo sapiens
ggtttcaccatgttg

SEQ ID NO: 74376 - DNA, 15 bp, Homo sapiens
gtttcaccatgttgg

SEQ ID NO: 74377 - DNA, 15 bp, Homo sapiens
tttcaccatgttggc

SEQ ID NO: 74378 - DNA, 15 bp, Homo sapiens
ttcaccatgttggcc

SEQ ID NO: 74379 - DNA, 15 bp, Homo sapiens
tcaccatgttggcca

SEQ ID NO: 74380 - DNA, 15 bp, Homo sapiens
caccatgttggccag

SEQ ID NO: 74381 - DNA, 15 bp, Homo sapiens
ccatgttggccaggc

SEQ ID NO: 74382 - DNA, 15 bp, Homo sapiens
catgttggccaggct

SEQ ID NO: 74383 - DNA, 15 bp, Homo sapiens
atgttggccaggcta

SEQ ID NO: 74384 - DNA, 15 bp, Homo sapiens
tgttggccaggctag

SEQ ID NO: 74385 - DNA, 15 bp, Homo sapiens
gttggccaggctagc

SEQ ID NO: 74386 - DNA, 15 bp, Homo sapiens
ttggccaggctagcc

SEQ ID NO: 74387 - DNA, 15 bp, Homo sapiens
tggccaggctagcct

SEQ ID NO: 74388 - DNA, 15 bp, Homo sapiens
ggccaggctagcctt

SEQ ID NO: 74389 - DNA, 15 bp, Homo sapiens
gccaggctagccttg

SEQ ID NO: 74390 - DNA, 15 bp, Homo sapiens
ccaggctagccttga

SEQ ID NO: 74391 - DNA, 15 bp, Homo sapiens
caggctagccttgaa

SEQ ID NO: 74392 - DNA, 15 bp, Homo sapiens
aggctagccttgaac

SEQ ID NO: 74393 - DNA, 15 bp, Homo sapiens
ggctagccttgaact

SEQ ID NO: 74394 - DNA, 15 bp, Homo sapiens
gctagccttgaactc

SEQ ID NO: 74395 - DNA, 15 bp, Homo sapiens
ctagccttgaactcc

SEQ ID NO: 74396 - DNA, 15 bp, Homo sapiens
tagccttgaactcct

SEQ ID NO: 74397 - DNA, 15 bp, Homo sapiens
agccttgaactcctg

SEQ ID NO: 74398 - DNA, 15 bp, Homo sapiens
gccttgaactcctga

SEQ ID NO: 74399 - DNA, 15 bp, Homo sapiens
ccttgaactcctgac

SEQ ID NO: 74400 - DNA, 15 bp, Homo sapiens
cttgaactcctgacc

SEQ ID NO: 74401 - DNA, 15 bp, Homo sapiens
ttgaactcctgacct

SEQ ID NO: 74402 - DNA, 15 bp, Homo sapiens
tgaactcctgacctt

SEQ ID NO: 74403 - DNA, 15 bp, Homo sapiens
gaactcctgacctta

SEQ ID NO: 74404 - DNA, 15 bp, Homo sapiens
aactcctgaccttag

SEQ ID NO: 74405 - DNA, 15 bp, Homo sapiens
actcctgaccttagg

SEQ ID NO: 74406 - DNA, 15 bp, Homo sapiens
ctcctgaccttaggt

SEQ ID NO: 74407 - DNA, 15 bp, Homo sapiens
tcctgaccttaggta

SEQ ID NO: 74408 - DNA, 15 bp, Homo sapiens
cctgaccttaggtaa

SEQ ID NO: 74409 - DNA, 15 bp, Homo sapiens
ctgaccttaggtaat

SEQ ID NO: 74410 - DNA, 15 bp, Homo sapiens
tgaccttaggtaatc

SEQ ID NO: 74411 - DNA, 15 bp, Homo sapiens
gaccttaggtaatct

SEQ ID NO: 74412 - DNA, 15 bp, Homo sapiens
accttaggtaatctg

SEQ ID NO: 74413 - DNA, 15 bp, Homo sapiens
ccttaggtaatctgc

SEQ ID NO: 74414 - DNA, 15 bp, Homo sapiens
cttaggtaatctgcc

SEQ ID NO: 74415 - DNA, 15 bp, Homo sapiens
ttaggtaatctgcct

SEQ ID NO: 74416 - DNA, 15 bp, Homo sapiens
taggtaatctgcctg

SEQ ID NO: 74417 - DNA, 15 bp, Homo sapiens
aggtaatctgcctgc

SEQ ID NO: 74418 - DNA, 15 bp, Homo sapiens
ggtaatctgcctgcc

SEQ ID NO: 74419 - DNA, 15 bp, Homo sapiens
gtaatctgcctgcct

SEQ ID NO: 74420 - DNA, 15 bp, Homo sapiens
taatctgcctgcctt

SEQ ID NO: 74421 - DNA, 15 bp, Homo sapiens
aatctgcctgccttg

SEQ ID NO: 74422 - DNA, 15 bp, Homo sapiens
atctgcctgccttgg

SEQ ID NO: 74423 - DNA, 15 bp, Homo sapiens
tctgcctgccttggc

SEQ ID NO: 74424 - DNA, 15 bp, Homo sapiens
ctgcctgccttggcc

SEQ ID NO: 74425 - DNA, 15 bp, Homo sapiens
tgcctgccttggcct

SEQ ID NO: 74426 - DNA, 15 bp, Homo sapiens
aagtgctgggattat

SEQ ID NO: 74427 - DNA, 15 bp, Homo sapiens
agtgctgggattata

SEQ ID NO: 74428 - DNA, 15 bp, Homo sapiens
gtgctgggattatag

SEQ ID NO: 74429 - DNA, 15 bp, Homo sapiens
gctgggattataggc

SEQ ID NO: 74430 - DNA, 15 bp, Homo sapiens
ctgggattataggcg

SEQ ID NO: 74431 - DNA, 15 bp, Homo sapiens
tgggattataggcgt

SEQ ID NO: 74432 - DNA, 15 bp, Homo sapiens
gggattataggcgtg

SEQ ID NO: 74433 - DNA, 15 bp, Homo sapiens
ggattataggcgtga

SEQ ID NO: 74434 - DNA, 15 bp, Homo sapiens
gattataggcgtgag

SEQ ID NO: 74435 - DNA, 15 bp, Homo sapiens
attataggcgtgagc

SEQ ID NO: 74436 - DNA, 15 bp, Homo sapiens
ttataggcgtgagcc

SEQ ID NO: 74437 - DNA, 15 bp, Homo sapiens
tataggcgtgagcca

SEQ ID NO: 74438 - DNA, 15 bp, Homo sapiens
ataggcgtgagccac

SEQ ID NO: 74439 - DNA, 15 bp, Homo sapiens
taggcgtgagccacc

SEQ ID NO: 74440 - DNA, 15 bp, Homo sapiens
gcgtgagccaccgtt

SEQ ID NO: 74441 - DNA, 15 bp, Homo sapiens
cgtgagccaccgttc

SEQ ID NO: 74442 - DNA, 15 bp, Homo sapiens
gtgagccaccgttct

SEQ ID NO: 74443 - DNA, 15 bp, Homo sapiens
tgagccaccgttctg

SEQ ID NO: 74444 - DNA, 15 bp, Homo sapiens
gagccaccgttctgg

SEQ ID NO: 74445 - DNA, 15 bp, Homo sapiens
agccaccgttctggc

SEQ ID NO: 74446 - DNA, 15 bp, Homo sapiens
gccaccgttctggcc

SEQ ID NO: 74447 - DNA, 15 bp, Homo sapiens
ccaccgttctggcca

SEQ ID NO: 74448 - DNA, 15 bp, Homo sapiens
caccgttctggccac

SEQ ID NO: 74449 - DNA, 15 bp, Homo sapiens
accgttctggccacc

SEQ ID NO: 74450 - DNA, 15 bp, Homo sapiens
ccgttctggccacct

SEQ ID NO: 74451 - DNA, 15 bp, Homo sapiens
cgttctggccacctc

SEQ ID NO: 74452 - DNA, 15 bp, Homo sapiens
gttctggccacctcc

SEQ ID NO: 74453 - DNA, 15 bp, Homo sapiens
ttctggccacctcct

SEQ ID NO: 74454 - DNA, 15 bp, Homo sapiens
tctggccacctccta

SEQ ID NO: 74455 - DNA, 15 bp, Homo sapiens
ctggccacctcctac

SEQ ID NO: 74456 - DNA, 15 bp, Homo sapiens
tggccacctcctact

SEQ ID NO: 74457 - DNA, 15 bp, Homo sapiens
ggccacctcctactt

SEQ ID NO: 74458 - DNA, 15 bp, Homo sapiens
gccacctcctacttc

SEQ ID NO: 74459 - DNA, 15 bp, Homo sapiens
ccacctcctacttct

SEQ ID NO: 74460 - DNA, 15 bp, Homo sapiens
cacctcctacttctt

SEQ ID NO: 74461 - DNA, 15 bp, Homo sapiens
acctcctacttcttt

SEQ ID NO: 74462 - DNA, 15 bp, Homo sapiens
cctcctacttctttc

SEQ ID NO: 74463 - DNA, 15 bp, Homo sapiens
ctcctacttctttca

SEQ ID NO: 74464 - DNA, 15 bp, Homo sapiens
tcctacttctttcat

SEQ ID NO: 74465 - DNA, 15 bp, Homo sapiens
cctacttctttcatt

SEQ ID NO: 74466 - DNA, 15 bp, Homo sapiens
ctacttctttcatta

SEQ ID NO: 74467 - DNA, 15 bp, Homo sapiens
tacttctttcattag

SEQ ID NO: 74468 - DNA, 15 bp, Homo sapiens
acttctttcattagt

SEQ ID NO: 74469 - DNA, 15 bp, Homo sapiens
cttctttcattagtc

SEQ ID NO: 74470 - DNA, 15 bp, Homo sapiens
ttctttcattagtct

SEQ ID NO: 74471 - DNA, 15 bp, Homo sapiens
tctttcattagtctt

SEQ ID NO: 74472 - DNA, 15 bp, Homo sapiens
ctttcattagtctta

SEQ ID NO: 74473 - DNA, 15 bp, Homo sapiens
tttcattagtcttaa

SEQ ID NO: 74474 - DNA, 15 bp, Homo sapiens
ttcattagtcttaat

SEQ ID NO: 74475 - DNA, 15 bp, Homo sapiens
tcattagtcttaatt

SEQ ID NO: 74476 - DNA, 15 bp, Homo sapiens
cattagtcttaattc

SEQ ID NO: 74477 - DNA, 15 bp, Homo sapiens
attagtcttaattcc

SEQ ID NO: 74478 - DNA, 15 bp, Homo sapiens
ttagtcttaattcct

SEQ ID NO: 74479 - DNA, 15 bp, Homo sapiens
tagtcttaattcctt

SEQ ID NO: 74480 - DNA, 15 bp, Homo sapiens
agtcttaattcctta

SEQ ID NO: 74481 - DNA, 15 bp, Homo sapiens
gtcttaattccttag

SEQ ID NO: 74482 - DNA, 15 bp, Homo sapiens
tcttaattccttagt

SEQ ID NO: 74483 - DNA, 15 bp, Homo sapiens
cttaattccttagtg

SEQ ID NO: 74484 - DNA, 15 bp, Homo sapiens
ttaattccttagtgg

SEQ ID NO: 74485 - DNA, 15 bp, Homo sapiens
taattccttagtgga

SEQ ID NO: 74486 - DNA, 15 bp, Homo sapiens
aattccttagtggat

SEQ ID NO: 74487 - DNA, 15 bp, Homo sapiens
attccttagtggatt

SEQ ID NO: 74488 - DNA, 15 bp, Homo sapiens
ttccttagtggattt

SEQ ID NO: 74489 - DNA, 15 bp, Homo sapiens
tccttagtggatttg

SEQ ID NO: 74490 - DNA, 15 bp, Homo sapiens
ccttagtggatttga

SEQ ID NO: 74491 - DNA, 15 bp, Homo sapiens
cttagtggatttgac

SEQ ID NO: 74492 - DNA, 15 bp, Homo sapiens
ttagtggatttgaca

SEQ ID NO: 74493 - DNA, 15 bp, Homo sapiens
tagtggatttgacag

SEQ ID NO: 74494 - DNA, 15 bp, Homo sapiens
agtggatttgacagt

SEQ ID NO: 74495 - DNA, 15 bp, Homo sapiens
gtggatttgacagtg

SEQ ID NO: 74496 - DNA, 15 bp, Homo sapiens
tggatttgacagtgt

SEQ ID NO: 74497 - DNA, 15 bp, Homo sapiens
ggatttgacagtgtt

SEQ ID NO: 74498 - DNA, 15 bp, Homo sapiens
gatttgacagtgttt

SEQ ID NO: 74499 - DNA, 15 bp, Homo sapiens
atttgacagtgttta

SEQ ID NO: 74500 - DNA, 15 bp, Homo sapiens
tttgacagtgtttat

SEQ ID NO: 74501 - DNA, 15 bp, Homo sapiens
ttgacagtgtttata

SEQ ID NO: 74502 - DNA, 15 bp, Homo sapiens
tgacagtgtttatat

SEQ ID NO: 74503 - DNA, 15 bp, Homo sapiens
gacagtgtttatatt

SEQ ID NO: 74504 - DNA, 15 bp, Homo sapiens
acagtgtttatatta

SEQ ID NO: 74505 - DNA, 15 bp, Homo sapiens
cagtgtttatattat

SEQ ID NO: 74506 - DNA, 15 bp, Homo sapiens
agtgtttatattatc

SEQ ID NO: 74507 - DNA, 15 bp, Homo sapiens
gtgtttatattatct

SEQ ID NO: 74508 - DNA, 15 bp, Homo sapiens
tgtttatattatcta

SEQ ID NO: 74509 - DNA, 15 bp, Homo sapiens
gtttatattatctac

SEQ ID NO: 74510 - DNA, 15 bp, Homo sapiens
tttatattatctaca

SEQ ID NO: 74511 - DNA, 15 bp, Homo sapiens
ttatattatctacac

SEQ ID NO: 74512 - DNA, 15 bp, Homo sapiens
tatattatctacacc

SEQ ID NO: 74513 - DNA, 15 bp, Homo sapiens
atattatctacacca

SEQ ID NO: 74514 - DNA, 15 bp, Homo sapiens
tattatctacaccaa

SEQ ID NO: 74515 - DNA, 15 bp, Homo sapiens
attatctacaccaat

SEQ ID NO: 74516 - DNA, 15 bp, Homo sapiens
ttatctacaccaatg

SEQ ID NO: 74517 - DNA, 15 bp, Homo sapiens
tatctacaccaatgc

SEQ ID NO: 74518 - DNA, 15 bp, Homo sapiens
atctacaccaatgca

SEQ ID NO: 74519 - DNA, 15 bp, Homo sapiens
tctacaccaatgcat

SEQ ID NO: 74520 - DNA, 15 bp, Homo sapiens
ctacaccaatgcatt

SEQ ID NO: 74521 - DNA, 15 bp, Homo sapiens
tacaccaatgcattt

SEQ ID NO: 74522 - DNA, 15 bp, Homo sapiens
acaccaatgcatttt

SEQ ID NO: 74523 - DNA, 15 bp, Homo sapiens
caccaatgcattttt

SEQ ID NO: 74524 - DNA, 15 bp, Homo sapiens
accaatgcatttttt

SEQ ID NO: 74525 - DNA, 15 bp, Homo sapiens
ccaatgcattttttt

SEQ ID NO: 74526 - DNA, 15 bp, Homo sapiens
caatgcatttttttg

SEQ ID NO: 74527 - DNA, 15 bp, Homo sapiens
aatgcatttttttgt

SEQ ID NO: 74528 - DNA, 15 bp, Homo sapiens
atgcatttttttgta

SEQ ID NO: 74529 - DNA, 15 bp, Homo sapiens
tgcatttttttgtat

SEQ ID NO: 74530 - DNA, 15 bp, Homo sapiens
gcatttttttgtatg

SEQ ID NO: 74531 - DNA, 15 bp, Homo sapiens
catttttttgtatgt

SEQ ID NO: 74532 - DNA, 15 bp, Homo sapiens
atttttttgtatgtt

SEQ ID NO: 74533 - DNA, 15 bp, Homo sapiens
tttttttgtatgtta

SEQ ID NO: 74534 - DNA, 15 bp, Homo sapiens
ttttttgtatgttaa

SEQ ID NO: 74535 - DNA, 15 bp, Homo sapiens
tttttgtatgttaat

SEQ ID NO: 74536 - DNA, 15 bp, Homo sapiens
ttttgtatgttaata

SEQ ID NO: 74537 - DNA, 15 bp, Homo sapiens
tttgtatgttaataa

SEQ ID NO: 74538 - DNA, 15 bp, Homo sapiens
ttgtatgttaataat

SEQ ID NO: 74539 - DNA, 15 bp, Homo sapiens
tgtatgttaataata

SEQ ID NO: 74540 - DNA, 15 bp, Homo sapiens
gtatgttaataatag

SEQ ID NO: 74541 - DNA, 15 bp, Homo sapiens
tatgttaataatagg

SEQ ID NO: 74542 - DNA, 15 bp, Homo sapiens
atgttaataatagga

SEQ ID NO: 74543 - DNA, 15 bp, Homo sapiens
tgttaataataggag

SEQ ID NO: 74544 - DNA, 15 bp, Homo sapiens
gttaataataggaga

SEQ ID NO: 74545 - DNA, 15 bp, Homo sapiens
ttaataataggagat

SEQ ID NO: 74546 - DNA, 15 bp, Homo sapiens
taataataggagata

SEQ ID NO: 74547 - DNA, 15 bp, Homo sapiens
aataataggagatat

SEQ ID NO: 74548 - DNA, 15 bp, Homo sapiens
ataataggagatatt

SEQ ID NO: 74549 - DNA, 15 bp, Homo sapiens
taataggagatattt

SEQ ID NO: 74550 - DNA, 15 bp, Homo sapiens
aataggagatattta

SEQ ID NO: 74551 - DNA, 15 bp, Homo sapiens
ataggagatatttat

SEQ ID NO: 74552 - DNA, 15 bp, Homo sapiens
taggagatatttatt

SEQ ID NO: 74553 - DNA, 15 bp, Homo sapiens
aggagatatttattg

SEQ ID NO: 74554 - DNA, 15 bp, Homo sapiens
ggagatatttattgg

SEQ ID NO: 74555 - DNA, 15 bp, Homo sapiens
gagatatttattggg

SEQ ID NO: 74556 - DNA, 15 bp, Homo sapiens
agatatttattgggc

SEQ ID NO: 74557 - DNA, 15 bp, Homo sapiens
gatatttattgggca

SEQ ID NO: 74558 - DNA, 15 bp, Homo sapiens
atatttattgggcat

SEQ ID NO: 74559 - DNA, 15 bp, Homo sapiens
tatttattgggcatt

SEQ ID NO: 74560 - DNA, 15 bp, Homo sapiens
atttattgggcattt

SEQ ID NO: 74561 - DNA, 15 bp, Homo sapiens
tttattgggcattta

SEQ ID NO: 74562 - DNA, 15 bp, Homo sapiens
ttattgggcatttat

SEQ ID NO: 74563 - DNA, 15 bp, Homo sapiens
tattgggcatttatt

SEQ ID NO: 74564 - DNA, 15 bp, Homo sapiens
attgggcatttattt

SEQ ID NO: 74565 - DNA, 15 bp, Homo sapiens
ttgggcatttattta

SEQ ID NO: 74566 - DNA, 15 bp, Homo sapiens
tgggcatttatttac

SEQ ID NO: 74567 - DNA, 15 bp, Homo sapiens
gggcatttatttaca

SEQ ID NO: 74568 - DNA, 15 bp, Homo sapiens
ggcatttatttacat

SEQ ID NO: 74569 - DNA, 15 bp, Homo sapiens
gcatttatttacata

SEQ ID NO: 74570 - DNA, 15 bp, Homo sapiens
catttatttacatac

SEQ ID NO: 74571 - DNA, 15 bp, Homo sapiens
atttatttacatact

SEQ ID NO: 74572 - DNA, 15 bp, Homo sapiens
tttatttacatactt

SEQ ID NO: 74573 - DNA, 15 bp, Homo sapiens
ttatttacatactta

SEQ ID NO: 74574 - DNA, 15 bp, Homo sapiens
tatttacatacttat

SEQ ID NO: 74575 - DNA, 15 bp, Homo sapiens
atttacatacttatt

SEQ ID NO: 74576 - DNA, 15 bp, Homo sapiens
tttacatacttattt

SEQ ID NO: 74577 - DNA, 15 bp, Homo sapiens
ttacatacttatttg

SEQ ID NO: 74578 - DNA, 15 bp, Homo sapiens
tacatacttatttgc

SEQ ID NO: 74579 - DNA, 15 bp, Homo sapiens
acatacttatttgca

SEQ ID NO: 74580 - DNA, 15 bp, Homo sapiens
catacttatttgcat

SEQ ID NO: 74581 - DNA, 15 bp, Homo sapiens
atacttatttgcatg

SEQ ID NO: 74582 - DNA, 15 bp, Homo sapiens
tacttatttgcatgt

SEQ ID NO: 74583 - DNA, 15 bp, Homo sapiens
acttatttgcatgtg

SEQ ID NO: 74584 - DNA, 15 bp, Homo sapiens
cttatttgcatgtgt

SEQ ID NO: 74585 - DNA, 15 bp, Homo sapiens
ttatttgcatgtgta

SEQ ID NO: 74586 - DNA, 15 bp, Homo sapiens
tatttgcatgtgtaa

SEQ ID NO: 74587 - DNA, 15 bp, Homo sapiens
atttgcatgtgtaac

SEQ ID NO: 74588 - DNA, 15 bp, Homo sapiens
tttgcatgtgtaact

SEQ ID NO: 74589 - DNA, 15 bp, Homo sapiens
ttgcatgtgtaactg

SEQ ID NO: 74590 - DNA, 15 bp, Homo sapiens
tgcatgtgtaactgt

SEQ ID NO: 74591 - DNA, 15 bp, Homo sapiens
gcatgtgtaactgtt

SEQ ID NO: 74592 - DNA, 15 bp, Homo sapiens
catgtgtaactgttg

SEQ ID NO: 74593 - DNA, 15 bp, Homo sapiens
atgtgtaactgttgt

SEQ ID NO: 74594 - DNA, 15 bp, Homo sapiens
tgtgtaactgttgta

SEQ ID NO: 74595 - DNA, 15 bp, Homo sapiens
gtgtaactgttgtat

SEQ ID NO: 74596 - DNA, 15 bp, Homo sapiens
tgtaactgttgtata

SEQ ID NO: 74597 - DNA, 15 bp, Homo sapiens
gtaactgttgtatag

SEQ ID NO: 74598 - DNA, 15 bp, Homo sapiens
taactgttgtatagc

SEQ ID NO: 74599 - DNA, 15 bp, Homo sapiens
aactgttgtatagcc

SEQ ID NO: 74600 - DNA, 15 bp, Homo sapiens
actgttgtatagcca

SEQ ID NO: 74601 - DNA, 15 bp, Homo sapiens
ctgttgtatagccag

SEQ ID NO: 74602 - DNA, 15 bp, Homo sapiens
tgttgtatagccagt

SEQ ID NO: 74603 - DNA, 15 bp, Homo sapiens
gttgtatagccagtt

SEQ ID NO: 74604 - DNA, 15 bp, Homo sapiens
ttgtatagccagttt

SEQ ID NO: 74605 - DNA, 15 bp, Homo sapiens
tgtatagccagttta

SEQ ID NO: 74606 - DNA, 15 bp, Homo sapiens
gtatagccagtttat

SEQ ID NO: 74607 - DNA, 15 bp, Homo sapiens
tatagccagtttatg

SEQ ID NO: 74608 - DNA, 15 bp, Homo sapiens
atagccagtttatgt

SEQ ID NO: 74609 - DNA, 15 bp, Homo sapiens
tagccagtttatgta

SEQ ID NO: 74610 - DNA, 15 bp, Homo sapiens
agccagtttatgtat

SEQ ID NO: 74611 - DNA, 15 bp, Homo sapiens
gccagtttatgtata

SEQ ID NO: 74612 - DNA, 15 bp, Homo sapiens
ccagtttatgtatat

SEQ ID NO: 74613 - DNA, 15 bp, Homo sapiens
cagtttatgtatata

SEQ ID NO: 74614 - DNA, 15 bp, Homo sapiens
agtttatgtatataa

SEQ ID NO: 74615 - DNA, 15 bp, Homo sapiens
gtttatgtatataat

SEQ ID NO: 74616 - DNA, 15 bp, Homo sapiens
tttatgtatataatc

SEQ ID NO: 74617 - DNA, 15 bp, Homo sapiens
ttatgtatataatct

SEQ ID NO: 74618 - DNA, 15 bp, Homo sapiens
tatgtatataatctt

SEQ ID NO: 74619 - DNA, 15 bp, Homo sapiens
atgtatataatctta

SEQ ID NO: 74620 - DNA, 15 bp, Homo sapiens
tgtatataatcttac

SEQ ID NO: 74621 - DNA, 15 bp, Homo sapiens
gtatataatcttact

SEQ ID NO: 74622 - DNA, 15 bp, Homo sapiens
tatataatcttacta

SEQ ID NO: 74623 - DNA, 15 bp, Homo sapiens
atataatcttactaa

SEQ ID NO: 74624 - DNA, 15 bp, Homo sapiens
tataatcttactaaa

SEQ ID NO: 74625 - DNA, 15 bp, Homo sapiens
ataatcttactaaat

SEQ ID NO: 74626 - DNA, 15 bp, Homo sapiens
taatcttactaaatc

SEQ ID NO: 74627 - DNA, 15 bp, Homo sapiens
aatcttactaaatct

SEQ ID NO: 74628 - DNA, 15 bp, Homo sapiens
atcttactaaatctc

SEQ ID NO: 74629 - DNA, 15 bp, Homo sapiens
tcttactaaatctct

SEQ ID NO: 74630 - DNA, 15 bp, Homo sapiens
cttactaaatctcta

SEQ ID NO: 74631 - DNA, 15 bp, Homo sapiens
ttactaaatctctac

SEQ ID NO: 74632 - DNA, 15 bp, Homo sapiens
tactaaatctctaca

SEQ ID NO: 74633 - DNA, 15 bp, Homo sapiens
actaaatctctacag

SEQ ID NO: 74634 - DNA, 15 bp, Homo sapiens
ctaaatctctacagt

SEQ ID NO: 74635 - DNA, 15 bp, Homo sapiens
taaatctctacagta

SEQ ID NO: 74636 - DNA, 15 bp, Homo sapiens
aaatctctacagtaa

SEQ ID NO: 74637 - DNA, 15 bp, Homo sapiens
aatctctacagtaaa

SEQ ID NO: 74638 - DNA, 15 bp, Homo sapiens
atctctacagtaaat

SEQ ID NO: 74639 - DNA, 15 bp, Homo sapiens
tctctacagtaaatc

SEQ ID NO: 74640 - DNA, 15 bp, Homo sapiens
ctctacagtaaatct

SEQ ID NO: 74641 - DNA, 15 bp, Homo sapiens
tctacagtaaatcta

SEQ ID NO: 74642 - DNA, 15 bp, Homo sapiens
ctacagtaaatctat

SEQ ID NO: 74643 - DNA, 15 bp, Homo sapiens
tacagtaaatctatc

SEQ ID NO: 74644 - DNA, 15 bp, Homo sapiens
acagtaaatctatcc

SEQ ID NO: 74645 - DNA, 15 bp, Homo sapiens
cagtaaatctatccc

SEQ ID NO: 74646 - DNA, 15 bp, Homo sapiens
agtaaatctatcccc

SEQ ID NO: 74647 - DNA, 15 bp, Homo sapiens
gtaaatctatcccca

SEQ ID NO: 74648 - DNA, 15 bp, Homo sapiens
taaatctatccccat

SEQ ID NO: 74649 - DNA, 15 bp, Homo sapiens
aaatctatccccatt

SEQ ID NO: 74650 - DNA, 15 bp, Homo sapiens
aatctatccccattt

SEQ ID NO: 74651 - DNA, 15 bp, Homo sapiens
atctatccccatttc

SEQ ID NO: 74652 - DNA, 15 bp, Homo sapiens
tctatccccatttca

SEQ ID NO: 74653 - DNA, 15 bp, Homo sapiens
ctatccccatttcat

SEQ ID NO: 74654 - DNA, 15 bp, Homo sapiens
tatccccatttcata

SEQ ID NO: 74655 - DNA, 15 bp, Homo sapiens
atccccatttcatag

SEQ ID NO: 74656 - DNA, 15 bp, Homo sapiens
tccccatttcataga

SEQ ID NO: 74657 - DNA, 15 bp, Homo sapiens
ccccatttcatagat

SEQ ID NO: 74658 - DNA, 15 bp, Homo sapiens
cccatttcatagatg

SEQ ID NO: 74659 - DNA, 15 bp, Homo sapiens
ccatttcatagatgg

SEQ ID NO: 74660 - DNA, 15 bp, Homo sapiens
catttcatagatggt

SEQ ID NO: 74661 - DNA, 15 bp, Homo sapiens
atttcatagatggtt

SEQ ID NO: 74662 - DNA, 15 bp, Homo sapiens
tttcatagatggttt

SEQ ID NO: 74663 - DNA, 15 bp, Homo sapiens
ttcatagatggttta

SEQ ID NO: 74664 - DNA, 15 bp, Homo sapiens
tcatagatggtttaa

SEQ ID NO: 74665 - DNA, 15 bp, Homo sapiens
catagatggtttaaa

SEQ ID NO: 74666 - DNA, 15 bp, Homo sapiens
atagatggtttaaaa

SEQ ID NO: 74667 - DNA, 15 bp, Homo sapiens
tagatggtttaaaag

SEQ ID NO: 74668 - DNA, 15 bp, Homo sapiens
agatggtttaaaaga

SEQ ID NO: 74669 - DNA, 15 bp, Homo sapiens
gatggtttaaaagaa

SEQ ID NO: 74670 - DNA, 15 bp, Homo sapiens
atggtttaaaagaag

SEQ ID NO: 74671 - DNA, 15 bp, Homo sapiens
tggtttaaaagaagt

SEQ ID NO: 74672 - DNA, 15 bp, Homo sapiens
ggtttaaaagaagtt

SEQ ID NO: 74673 - DNA, 15 bp, Homo sapiens
gtttaaaagaagtta

SEQ ID NO: 74674 - DNA, 15 bp, Homo sapiens
tttaaaagaagttaa

SEQ ID NO: 74675 - DNA, 15 bp, Homo sapiens
ttaaaagaagttaac

SEQ ID NO: 74676 - DNA, 15 bp, Homo sapiens
taaaagaagttaact

SEQ ID NO: 74677 - DNA, 15 bp, Homo sapiens
aaaagaagttaactt

SEQ ID NO: 74678 - DNA, 15 bp, Homo sapiens
aaagaagttaacttc

SEQ ID NO: 74679 - DNA, 15 bp, Homo sapiens
aagaagttaacttcc

SEQ ID NO: 74680 - DNA, 15 bp, Homo sapiens
agaagttaacttccc

SEQ ID NO: 74681 - DNA, 15 bp, Homo sapiens
gaagttaacttcccc

SEQ ID NO: 74682 - DNA, 15 bp, Homo sapiens
aagttaacttcccca

SEQ ID NO: 74683 - DNA, 15 bp, Homo sapiens
agttaacttccccaa

SEQ ID NO: 74684 - DNA, 15 bp, Homo sapiens
gttaacttccccaag

SEQ ID NO: 74685 - DNA, 15 bp, Homo sapiens
ttaacttccccaagc

SEQ ID NO: 74686 - DNA, 15 bp, Homo sapiens
taacttccccaagca

SEQ ID NO: 74687 - DNA, 15 bp, Homo sapiens
aacttccccaagcat

SEQ ID NO: 74688 - DNA, 15 bp, Homo sapiens
acttccccaagcatt

SEQ ID NO: 74689 - DNA, 15 bp, Homo sapiens
cttccccaagcatta

SEQ ID NO: 74690 - DNA, 15 bp, Homo sapiens
ttccccaagcattac

SEQ ID NO: 74691 - DNA, 15 bp, Homo sapiens
tccccaagcattact

SEQ ID NO: 74692 - DNA, 15 bp, Homo sapiens
ccccaagcattactt

SEQ ID NO: 74693 - DNA, 15 bp, Homo sapiens
cccaagcattacttt

SEQ ID NO: 74694 - DNA, 15 bp, Homo sapiens
ccaagcattactttt

SEQ ID NO: 74695 - DNA, 15 bp, Homo sapiens
caagcattactttta

SEQ ID NO: 74696 - DNA, 15 bp, Homo sapiens
aagcattacttttag

SEQ ID NO: 74697 - DNA, 15 bp, Homo sapiens
agcattacttttagt

SEQ ID NO: 74698 - DNA, 15 bp, Homo sapiens
gcattacttttagta

SEQ ID NO: 74699 - DNA, 15 bp, Homo sapiens
cattacttttagtaa

SEQ ID NO: 74700 - DNA, 15 bp, Homo sapiens
attacttttagtaag

SEQ ID NO: 74701 - DNA, 15 bp, Homo sapiens
ttacttttagtaagt

SEQ ID NO: 74702 - DNA, 15 bp, Homo sapiens
tacttttagtaagta

SEQ ID NO: 74703 - DNA, 15 bp, Homo sapiens
acttttagtaagtag

SEQ ID NO: 74704 - DNA, 15 bp, Homo sapiens
cttttagtaagtagt

SEQ ID NO: 74705 - DNA, 15 bp, Homo sapiens
ttttagtaagtagtg

SEQ ID NO: 74706 - DNA, 15 bp, Homo sapiens
tttagtaagtagtga

SEQ ID NO: 74707 - DNA, 15 bp, Homo sapiens
ttagtaagtagtgag

SEQ ID NO: 74708 - DNA, 15 bp, Homo sapiens
tagtaagtagtgaga

SEQ ID NO: 74709 - DNA, 15 bp, Homo sapiens
agtaagtagtgagac

SEQ ID NO: 74710 - DNA, 15 bp, Homo sapiens
gtaagtagtgagact

SEQ ID NO: 74711 - DNA, 15 bp, Homo sapiens
taagtagtgagactg

SEQ ID NO: 74712 - DNA, 15 bp, Homo sapiens
aagtagtgagactga

SEQ ID NO: 74713 - DNA, 15 bp, Homo sapiens
agtagtgagactgaa

SEQ ID NO: 74714 - DNA, 15 bp, Homo sapiens
gtagtgagactgaag

SEQ ID NO: 74715 - DNA, 15 bp, Homo sapiens
tagtgagactgaagg

SEQ ID NO: 74716 - DNA, 15 bp, Homo sapiens
agtgagactgaaggt

SEQ ID NO: 74717 - DNA, 15 bp, Homo sapiens
gtgagactgaaggtt

SEQ ID NO: 74718 - DNA, 15 bp, Homo sapiens
tgagactgaaggttg

SEQ ID NO: 74719 - DNA, 15 bp, Homo sapiens
gagactgaaggttga

SEQ ID NO: 74720 - DNA, 15 bp, Homo sapiens
agactgaaggttgag

SEQ ID NO: 74721 - DNA, 15 bp, Homo sapiens
gactgaaggttgagt

SEQ ID NO: 74722 - DNA, 15 bp, Homo sapiens
actgaaggttgagtt

SEQ ID NO: 74723 - DNA, 15 bp, Homo sapiens
ctgaaggttgagttc

SEQ ID NO: 74724 - DNA, 15 bp, Homo sapiens
tgaaggttgagttct

SEQ ID NO: 74725 - DNA, 15 bp, Homo sapiens
gaaggttgagttctg

SEQ ID NO: 74726 - DNA, 15 bp, Homo sapiens
aaggttgagttctgg

SEQ ID NO: 74727 - DNA, 15 bp, Homo sapiens
aggttgagttctggt

SEQ ID NO: 74728 - DNA, 15 bp, Homo sapiens
ggttgagttctggtc

SEQ ID NO: 74729 - DNA, 15 bp, Homo sapiens
gttgagttctggtct

SEQ ID NO: 74730 - DNA, 15 bp, Homo sapiens
ttgagttctggtctg

SEQ ID NO: 74731 - DNA, 15 bp, Homo sapiens
tgagttctggtctgt

SEQ ID NO: 74732 - DNA, 15 bp, Homo sapiens
gagttctggtctgtc

SEQ ID NO: 74733 - DNA, 15 bp, Homo sapiens
agttctggtctgtca

SEQ ID NO: 74734 - DNA, 15 bp, Homo sapiens
gttctggtctgtcag

SEQ ID NO: 74735 - DNA, 15 bp, Homo sapiens
ttctggtctgtcaga

SEQ ID NO: 74736 - DNA, 15 bp, Homo sapiens
tctggtctgtcagat

SEQ ID NO: 74737 - DNA, 15 bp, Homo sapiens
ctggtctgtcagatt

SEQ ID NO: 74738 - DNA, 15 bp, Homo sapiens
tggtctgtcagattc

SEQ ID NO: 74739 - DNA, 15 bp, Homo sapiens
ggtctgtcagattcc

SEQ ID NO: 74740 - DNA, 15 bp, Homo sapiens
gtctgtcagattccg

SEQ ID NO: 74741 - DNA, 15 bp, Homo sapiens
tctgtcagattccga

SEQ ID NO: 74742 - DNA, 15 bp, Homo sapiens
ctgtcagattccgaa

SEQ ID NO: 74743 - DNA, 15 bp, Homo sapiens
tgtcagattccgaag

SEQ ID NO: 74744 - DNA, 15 bp, Homo sapiens
gtcagattccgaagt

SEQ ID NO: 74745 - DNA, 15 bp, Homo sapiens
tcagattccgaagtt

SEQ ID NO: 74746 - DNA, 15 bp, Homo sapiens
cagattccgaagttg

SEQ ID NO: 74747 - DNA, 15 bp, Homo sapiens
agattccgaagttgt

SEQ ID NO: 74748 - DNA, 15 bp, Homo sapiens
gattccgaagttgtt

SEQ ID NO: 74749 - DNA, 15 bp, Homo sapiens
attccgaagttgttt

SEQ ID NO: 74750 - DNA, 15 bp, Homo sapiens
ttccgaagttgtttc

SEQ ID NO: 74751 - DNA, 15 bp, Homo sapiens
tccgaagttgtttcc

SEQ ID NO: 74752 - DNA, 15 bp, Homo sapiens
ccgaagttgtttcct

SEQ ID NO: 74753 - DNA, 15 bp, Homo sapiens
cgaagttgtttcctt

SEQ ID NO: 74754 - DNA, 15 bp, Homo sapiens
gaagttgtttcctta

SEQ ID NO: 74755 - DNA, 15 bp, Homo sapiens
aagttgtttccttag

SEQ ID NO: 74756 - DNA, 15 bp, Homo sapiens
agttgtttccttagg

SEQ ID NO: 74757 - DNA, 15 bp, Homo sapiens
gttgtttccttagga

SEQ ID NO: 74758 - DNA, 15 bp, Homo sapiens
ttgtttccttaggaa

SEQ ID NO: 74759 - DNA, 15 bp, Homo sapiens
tgtttccttaggaac

SEQ ID NO: 74760 - DNA, 15 bp, Homo sapiens
gtttccttaggaacc

SEQ ID NO: 74761 - DNA, 15 bp, Homo sapiens
tttccttaggaacca

SEQ ID NO: 74762 - DNA, 15 bp, Homo sapiens
ttccttaggaaccat

SEQ ID NO: 74763 - DNA, 15 bp, Homo sapiens
tccttaggaaccata

SEQ ID NO: 74764 - DNA, 15 bp, Homo sapiens
ccttaggaaccatat

SEQ ID NO: 74765 - DNA, 15 bp, Homo sapiens
cttaggaaccatatt

SEQ ID NO: 74766 - DNA, 15 bp, Homo sapiens
ttaggaaccatatta

SEQ ID NO: 74767 - DNA, 15 bp, Homo sapiens
taggaaccatattat

SEQ ID NO: 74768 - DNA, 15 bp, Homo sapiens
aggaaccatattatc

SEQ ID NO: 74769 - DNA, 15 bp, Homo sapiens
ggaaccatattatct

SEQ ID NO: 74770 - DNA, 15 bp, Homo sapiens
gaaccatattatctt

SEQ ID NO: 74771 - DNA, 15 bp, Homo sapiens
aaccatattatcttg

SEQ ID NO: 74772 - DNA, 15 bp, Homo sapiens
accatattatcttgt

SEQ ID NO: 74773 - DNA, 15 bp, Homo sapiens
ccatattatcttgtg

SEQ ID NO: 74774 - DNA, 15 bp, Homo sapiens
catattatcttgtgt

SEQ ID NO: 74775 - DNA, 15 bp, Homo sapiens
atattatcttgtgta

SEQ ID NO: 74776 - DNA, 15 bp, Homo sapiens
tattatcttgtgtac

SEQ ID NO: 74777 - DNA, 15 bp, Homo sapiens
attatcttgtgtaca

SEQ ID NO: 74778 - DNA, 15 bp, Homo sapiens
ttatcttgtgtacaa

SEQ ID NO: 74779 - DNA, 15 bp, Homo sapiens
tatcttgtgtacaac

SEQ ID NO: 74780 - DNA, 15 bp, Homo sapiens
atcttgtgtacaact

SEQ ID NO: 74781 - DNA, 15 bp, Homo sapiens
tcttgtgtacaactc

SEQ ID NO: 74782 - DNA, 15 bp, Homo sapiens
cttgtgtacaactct

SEQ ID NO: 74783 - DNA, 15 bp, Homo sapiens
ttgtgtacaactctt

SEQ ID NO: 74784 - DNA, 15 bp, Homo sapiens
tgtgtacaactcttg

SEQ ID NO: 74785 - DNA, 15 bp, Homo sapiens
gtgtacaactcttgg

SEQ ID NO: 74786 - DNA, 15 bp, Homo sapiens
tgtacaactcttggg

SEQ ID NO: 74787 - DNA, 15 bp, Homo sapiens
gtacaactcttgggc

SEQ ID NO: 74788 - DNA, 15 bp, Homo sapiens
tacaactcttgggct

SEQ ID NO: 74789 - DNA, 15 bp, Homo sapiens
acaactcttgggcta

SEQ ID NO: 74790 - DNA, 15 bp, Homo sapiens
caactcttgggctaa

SEQ ID NO: 74791 - DNA, 15 bp, Homo sapiens
aactcttgggctaat

SEQ ID NO: 74792 - DNA, 15 bp, Homo sapiens
actcttgggctaatc

SEQ ID NO: 74793 - DNA, 15 bp, Homo sapiens
ctcttgggctaatct

SEQ ID NO: 74794 - DNA, 15 bp, Homo sapiens
tcttgggctaatctt

SEQ ID NO: 74795 - DNA, 15 bp, Homo sapiens
cttgggctaatcttg

SEQ ID NO: 74796 - DNA, 15 bp, Homo sapiens
ttgggctaatcttgt

SEQ ID NO: 74797 - DNA, 15 bp, Homo sapiens
tgggctaatcttgtt

SEQ ID NO: 74798 - DNA, 15 bp, Homo sapiens
gggctaatcttgtta

SEQ ID NO: 74799 - DNA, 15 bp, Homo sapiens
ggctaatcttgttaa

SEQ ID NO: 74800 - DNA, 15 bp, Homo sapiens
gctaatcttgttaat

SEQ ID NO: 74801 - DNA, 15 bp, Homo sapiens
ctaatcttgttaata

SEQ ID NO: 74802 - DNA, 15 bp, Homo sapiens
taatcttgttaatat

SEQ ID NO: 74803 - DNA, 15 bp, Homo sapiens
aatcttgttaatatt

SEQ ID NO: 74804 - DNA, 15 bp, Homo sapiens
atcttgttaatattc

SEQ ID NO: 74805 - DNA, 15 bp, Homo sapiens
tcttgttaatattct

SEQ ID NO: 74806 - DNA, 15 bp, Homo sapiens
cttgttaatattctt

SEQ ID NO: 74807 - DNA, 15 bp, Homo sapiens
ttgttaatattcttt

SEQ ID NO: 74808 - DNA, 15 bp, Homo sapiens
tgttaatattcttta

SEQ ID NO: 74809 - DNA, 15 bp, Homo sapiens
gttaatattctttat

SEQ ID NO: 74810 - DNA, 15 bp, Homo sapiens
ttaatattctttatt

SEQ ID NO: 74811 - DNA, 15 bp, Homo sapiens
taatattctttattt

SEQ ID NO: 74812 - DNA, 15 bp, Homo sapiens
aatattctttatttg

SEQ ID NO: 74813 - DNA, 15 bp, Homo sapiens
atattctttatttga

SEQ ID NO: 74814 - DNA, 15 bp, Homo sapiens
tattctttatttgac

SEQ ID NO: 74815 - DNA, 15 bp, Homo sapiens
attctttatttgacc

SEQ ID NO: 74816 - DNA, 15 bp, Homo sapiens
ttctttatttgacct

SEQ ID NO: 74817 - DNA, 15 bp, Homo sapiens
tctttatttgacctc

SEQ ID NO: 74818 - DNA, 15 bp, Homo sapiens
ctttatttgacctca

SEQ ID NO: 74819 - DNA, 15 bp, Homo sapiens
tttatttgacctcac

SEQ ID NO: 74820 - DNA, 15 bp, Homo sapiens
ttatttgacctcaca

SEQ ID NO: 74821 - DNA, 15 bp, Homo sapiens
tatttgacctcacac

SEQ ID NO: 74822 - DNA, 15 bp, Homo sapiens
atttgacctcacact

SEQ ID NO: 74823 - DNA, 15 bp, Homo sapiens
tttgacctcacactg

SEQ ID NO: 74824 - DNA, 15 bp, Homo sapiens
ttgacctcacactgt

SEQ ID NO: 74825 - DNA, 15 bp, Homo sapiens
tgacctcacactgtt

SEQ ID NO: 74826 - DNA, 15 bp, Homo sapiens
gacctcacactgttg

SEQ ID NO: 74827 - DNA, 15 bp, Homo sapiens
acctcacactgttga

SEQ ID NO: 74828 - DNA, 15 bp, Homo sapiens
cctcacactgttgat

SEQ ID NO: 74829 - DNA, 15 bp, Homo sapiens
ctcacactgttgatt

SEQ ID NO: 74830 - DNA, 15 bp, Homo sapiens
tcacactgttgattc

SEQ ID NO: 74831 - DNA, 15 bp, Homo sapiens
cacactgttgattca

SEQ ID NO: 74832 - DNA, 15 bp, Homo sapiens
acactgttgattcat

SEQ ID NO: 74833 - DNA, 15 bp, Homo sapiens
cactgttgattcata

SEQ ID NO: 74834 - DNA, 15 bp, Homo sapiens
actgttgattcatac

SEQ ID NO: 74835 - DNA, 15 bp, Homo sapiens
ctgttgattcatacc

SEQ ID NO: 74836 - DNA, 15 bp, Homo sapiens
tgttgattcatacca

SEQ ID NO: 74837 - DNA, 15 bp, Homo sapiens
gttgattcataccat

SEQ ID NO: 74838 - DNA, 15 bp, Homo sapiens
ttgattcataccatg

SEQ ID NO: 74839 - DNA, 15 bp, Homo sapiens
tgattcataccatgt

SEQ ID NO: 74840 - DNA, 15 bp, Homo sapiens
gattcataccatgtt

SEQ ID NO: 74841 - DNA, 15 bp, Homo sapiens
attcataccatgttt

SEQ ID NO: 74842 - DNA, 15 bp, Homo sapiens
ttcataccatgttta

SEQ ID NO: 74843 - DNA, 15 bp, Homo sapiens
tcataccatgtttaa

SEQ ID NO: 74844 - DNA, 15 bp, Homo sapiens
cataccatgtttaaa

SEQ ID NO: 74845 - DNA, 15 bp, Homo sapiens
ataccatgtttaaaa

SEQ ID NO: 74846 - DNA, 15 bp, Homo sapiens
taccatgtttaaaat

SEQ ID NO: 74847 - DNA, 15 bp, Homo sapiens
accatgtttaaaatt

SEQ ID NO: 74848 - DNA, 15 bp, Homo sapiens
ccatgtttaaaattg

SEQ ID NO: 74849 - DNA, 15 bp, Homo sapiens
catgtttaaaattga

SEQ ID NO: 74850 - DNA, 15 bp, Homo sapiens
atgtttaaaattgaa

SEQ ID NO: 74851 - DNA, 15 bp, Homo sapiens
tgtttaaaattgaaa

SEQ ID NO: 74852 - DNA, 15 bp, Homo sapiens
gtttaaaattgaaat

SEQ ID NO: 74853 - DNA, 15 bp, Homo sapiens
tttaaaattgaaata

SEQ ID NO: 74854 - DNA, 15 bp, Homo sapiens
ttaaaattgaaatac

SEQ ID NO: 74855 - DNA, 15 bp, Homo sapiens
taaaattgaaataca

SEQ ID NO: 74856 - DNA, 15 bp, Homo sapiens
aaaattgaaatacat

SEQ ID NO: 74857 - DNA, 15 bp, Homo sapiens
aaattgaaatacatt

SEQ ID NO: 74858 - DNA, 15 bp, Homo sapiens
aattgaaatacatta

SEQ ID NO: 74859 - DNA, 15 bp, Homo sapiens
attgaaatacattac

SEQ ID NO: 74860 - DNA, 15 bp, Homo sapiens
ttgaaatacattacc

SEQ ID NO: 74861 - DNA, 15 bp, Homo sapiens
tgaaatacattacct

SEQ ID NO: 74862 - DNA, 15 bp, Homo sapiens
gaaatacattaccta

SEQ ID NO: 74863 - DNA, 15 bp, Homo sapiens
aaatacattacctat

SEQ ID NO: 74864 - DNA, 15 bp, Homo sapiens
aatacattacctata

SEQ ID NO: 74865 - DNA, 15 bp, Homo sapiens
atacattacctatat

SEQ ID NO: 74866 - DNA, 15 bp, Homo sapiens
tacattacctatatt

SEQ ID NO: 74867 - DNA, 15 bp, Homo sapiens
acattacctatattt

SEQ ID NO: 74868 - DNA, 15 bp, Homo sapiens
cattacctatattta

SEQ ID NO: 74869 - DNA, 15 bp, Homo sapiens
attacctatatttaa

SEQ ID NO: 74870 - DNA, 15 bp, Homo sapiens
ttacctatatttaaa

SEQ ID NO: 74871 - DNA, 15 bp, Homo sapiens
tacctatatttaaaa

SEQ ID NO: 74872 - DNA, 15 bp, Homo sapiens
acctatatttaaaaa

SEQ ID NO: 74873 - DNA, 15 bp, Homo sapiens
cctatatttaaaaat

SEQ ID NO: 74874 - DNA, 15 bp, Homo sapiens
ctatatttaaaaatt

SEQ ID NO: 74875 - DNA, 15 bp, Homo sapiens
tatatttaaaaattg

SEQ ID NO: 74876 - DNA, 15 bp, Homo sapiens
atatttaaaaattga

SEQ ID NO: 74877 - DNA, 15 bp, Homo sapiens
tatttaaaaattgag

SEQ ID NO: 74878 - DNA, 15 bp, Homo sapiens
atttaaaaattgaga

SEQ ID NO: 74879 - DNA, 15 bp, Homo sapiens
tttaaaaattgagac

SEQ ID NO: 74880 - DNA, 15 bp, Homo sapiens
ttaaaaattgagacc

SEQ ID NO: 74881 - DNA, 15 bp, Homo sapiens
taaaaattgagacct

SEQ ID NO: 74882 - DNA, 15 bp, Homo sapiens
aaaaattgagacctc

SEQ ID NO: 74883 - DNA, 15 bp, Homo sapiens
aaaattgagacctca

SEQ ID NO: 74884 - DNA, 15 bp, Homo sapiens
aaattgagacctcac

SEQ ID NO: 74885 - DNA, 15 bp, Homo sapiens
aattgagacctcaca

SEQ ID NO: 74886 - DNA, 15 bp, Homo sapiens
attgagacctcacat

SEQ ID NO: 74887 - DNA, 15 bp, Homo sapiens
ttgagacctcacata

SEQ ID NO: 74888 - DNA, 15 bp, Homo sapiens
tgagacctcacataa

SEQ ID NO: 74889 - DNA, 15 bp, Homo sapiens
gagacctcacataaa

SEQ ID NO: 74890 - DNA, 15 bp, Homo sapiens
agacctcacataaaa

SEQ ID NO: 74891 - DNA, 15 bp, Homo sapiens
gacctcacataaaaa

SEQ ID NO: 74892 - DNA, 15 bp, Homo sapiens
acctcacataaaaag

SEQ ID NO: 74893 - DNA, 15 bp, Homo sapiens
cctcacataaaaagc

SEQ ID NO: 74894 - DNA, 15 bp, Homo sapiens
ctcacataaaaagct

SEQ ID NO: 74895 - DNA, 15 bp, Homo sapiens
tcacataaaaagcta

SEQ ID NO: 74896 - DNA, 15 bp, Homo sapiens
cacataaaaagctat

SEQ ID NO: 74897 - DNA, 15 bp, Homo sapiens
acataaaaagctata

SEQ ID NO: 74898 - DNA, 15 bp, Homo sapiens
cataaaaagctatat

SEQ ID NO: 74899 - DNA, 15 bp, Homo sapiens
ataaaaagctatatt

SEQ ID NO: 74900 - DNA, 15 bp, Homo sapiens
taaaaagctatattt

SEQ ID NO: 74901 - DNA, 15 bp, Homo sapiens
aaaaagctatatttc

SEQ ID NO: 74902 - DNA, 15 bp, Homo sapiens
aaaagctatatttct

SEQ ID NO: 74903 - DNA, 15 bp, Homo sapiens
aaagctatatttcta

SEQ ID NO: 74904 - DNA, 15 bp, Homo sapiens
aagctatatttctag

SEQ ID NO: 74905 - DNA, 15 bp, Homo sapiens
agctatatttctagc

SEQ ID NO: 74906 - DNA, 15 bp, Homo sapiens
gctatatttctagct

SEQ ID NO: 74907 - DNA, 15 bp, Homo sapiens
ctatatttctagctg

SEQ ID NO: 74908 - DNA, 15 bp, Homo sapiens
tatatttctagctgc

SEQ ID NO: 74909 - DNA, 15 bp, Homo sapiens
atatttctagctgct

SEQ ID NO: 74910 - DNA, 15 bp, Homo sapiens
tatttctagctgctt

SEQ ID NO: 74911 - DNA, 15 bp, Homo sapiens
atttctagctgcttt

SEQ ID NO: 74912 - DNA, 15 bp, Homo sapiens
tttctagctgctttt

SEQ ID NO: 74913 - DNA, 15 bp, Homo sapiens
ttctagctgcttttg

SEQ ID NO: 74914 - DNA, 15 bp, Homo sapiens
tctagctgcttttga

SEQ ID NO: 74915 - DNA, 15 bp, Homo sapiens
ctagctgcttttgaa

SEQ ID NO: 74916 - DNA, 15 bp, Homo sapiens
tagctgcttttgaaa

SEQ ID NO: 74917 - DNA, 15 bp, Homo sapiens
agctgcttttgaaat

SEQ ID NO: 74918 - DNA, 15 bp, Homo sapiens
gctgcttttgaaatt

SEQ ID NO: 74919 - DNA, 15 bp, Homo sapiens
ctgcttttgaaattt

SEQ ID NO: 74920 - DNA, 15 bp, Homo sapiens
tgcttttgaaatttc

SEQ ID NO: 74921 - DNA, 15 bp, Homo sapiens
gcttttgaaatttcg

SEQ ID NO: 74922 - DNA, 15 bp, Homo sapiens
cttttgaaatttcga

SEQ ID NO: 74923 - DNA, 15 bp, Homo sapiens
ttttgaaatttcgaa

SEQ ID NO: 74924 - DNA, 15 bp, Homo sapiens
tttgaaatttcgaag

SEQ ID NO: 74925 - DNA, 15 bp, Homo sapiens
ttgaaatttcgaagg

SEQ ID NO: 74926 - DNA, 15 bp, Homo sapiens
tgaaatttcgaagga

SEQ ID NO: 74927 - DNA, 15 bp, Homo sapiens
gaaatttcgaaggat

SEQ ID NO: 74928 - DNA, 15 bp, Homo sapiens
aaatttcgaaggatc

SEQ ID NO: 74929 - DNA, 15 bp, Homo sapiens
aatttcgaaggatct

SEQ ID NO: 74930 - DNA, 15 bp, Homo sapiens
atttcgaaggatctt

SEQ ID NO: 74931 - DNA, 15 bp, Homo sapiens
tttcgaaggatcttc

SEQ ID NO: 74932 - DNA, 15 bp, Homo sapiens
ttcgaaggatcttcc

SEQ ID NO: 74933 - DNA, 15 bp, Homo sapiens
tcgaaggatcttcca

SEQ ID NO: 74934 - DNA, 15 bp, Homo sapiens
cgaaggatcttccaa

SEQ ID NO: 74935 - DNA, 15 bp, Homo sapiens
gaaggatcttccaac

SEQ ID NO: 74936 - DNA, 15 bp, Homo sapiens
aaggatcttccaaca

SEQ ID NO: 74937 - DNA, 15 bp, Homo sapiens
aggatcttccaacac

SEQ ID NO: 74938 - DNA, 15 bp, Homo sapiens
ggatcttccaacact

SEQ ID NO: 74939 - DNA, 15 bp, Homo sapiens
gatcttccaacactt

SEQ ID NO: 74940 - DNA, 15 bp, Homo sapiens
atcttccaacacttg

SEQ ID NO: 74941 - DNA, 15 bp, Homo sapiens
tcttccaacacttgg

SEQ ID NO: 74942 - DNA, 15 bp, Homo sapiens
cttccaacacttggc

SEQ ID NO: 74943 - DNA, 15 bp, Homo sapiens
ttccaacacttggct

SEQ ID NO: 74944 - DNA, 15 bp, Homo sapiens
tccaacacttggctg

SEQ ID NO: 74945 - DNA, 15 bp, Homo sapiens
ccaacacttggctga

SEQ ID NO: 74946 - DNA, 15 bp, Homo sapiens
caacacttggctgac

SEQ ID NO: 74947 - DNA, 15 bp, Homo sapiens
aacacttggctgaca

SEQ ID NO: 74948 - DNA, 15 bp, Homo sapiens
acacttggctgacat

SEQ ID NO: 74949 - DNA, 15 bp, Homo sapiens
cacttggctgacatt

SEQ ID NO: 74950 - DNA, 15 bp, Homo sapiens
acttggctgacattc

SEQ ID NO: 74951 - DNA, 15 bp, Homo sapiens
cttggctgacattcc

SEQ ID NO: 74952 - DNA, 15 bp, Homo sapiens
ttggctgacattcct

SEQ ID NO: 74953 - DNA, 15 bp, Homo sapiens
tggctgacattcctg

SEQ ID NO: 74954 - DNA, 15 bp, Homo sapiens
ggctgacattcctgc

SEQ ID NO: 74955 - DNA, 15 bp, Homo sapiens
gctgacattcctgcg

SEQ ID NO: 74956 - DNA, 15 bp, Homo sapiens
ctgacattcctgcgt

SEQ ID NO: 74957 - DNA, 15 bp, Homo sapiens
tgacattcctgcgtg

SEQ ID NO: 74958 - DNA, 15 bp, Homo sapiens
gacattcctgcgtga

SEQ ID NO: 74959 - DNA, 15 bp, Homo sapiens
acattcctgcgtgac

SEQ ID NO: 74960 - DNA, 15 bp, Homo sapiens
cattcctgcgtgaca

SEQ ID NO: 74961 - DNA, 15 bp, Homo sapiens
attcctgcgtgacaa

SEQ ID NO: 74962 - DNA, 15 bp, Homo sapiens
ttcctgcgtgacaaa

SEQ ID NO: 74963 - DNA, 15 bp, Homo sapiens
tcctgcgtgacaaaa

SEQ ID NO: 74964 - DNA, 15 bp, Homo sapiens
cctgcgtgacaaaaa

SEQ ID NO: 74965 - DNA, 15 bp, Homo sapiens
ctgcgtgacaaaaat

SEQ ID NO: 74966 - DNA, 15 bp, Homo sapiens
tgcgtgacaaaaatc

SEQ ID NO: 74967 - DNA, 15 bp, Homo sapiens
gcgtgacaaaaatca

SEQ ID NO: 74968 - DNA, 15 bp, Homo sapiens
cgtgacaaaaatcag

SEQ ID NO: 74969 - DNA, 15 bp, Homo sapiens
gtgacaaaaatcagc

SEQ ID NO: 74970 - DNA, 15 bp, Homo sapiens
tgacaaaaatcagct

SEQ ID NO: 74971 - DNA, 15 bp, Homo sapiens
gacaaaaatcagctg

SEQ ID NO: 74972 - DNA, 15 bp, Homo sapiens
caaaaatcagctgga

SEQ ID NO: 74973 - DNA, 15 bp, Homo sapiens
aaaaatcagctggag

SEQ ID NO: 74974 - DNA, 15 bp, Homo sapiens
aaaatcagctggagc

SEQ ID NO: 74975 - DNA, 15 bp, Homo sapiens
aaatcagctggagct

SEQ ID NO: 74976 - DNA, 15 bp, Homo sapiens
aatcagctggagctg

SEQ ID NO: 74977 - DNA, 15 bp, Homo sapiens
atcagctggagctgt

SEQ ID NO: 74978 - DNA, 15 bp, Homo sapiens
tcagctggagctgtg

SEQ ID NO: 74979 - DNA, 15 bp, Homo sapiens
cagctggagctgtgt

SEQ ID NO: 74980 - DNA, 15 bp, Homo sapiens
agctggagctgtgta

SEQ ID NO: 74981 - DNA, 15 bp, Homo sapiens
gctggagctgtgtaa

SEQ ID NO: 74982 - DNA, 15 bp, Homo sapiens
ctggagctgtgtaat

SEQ ID NO: 74983 - DNA, 15 bp, Homo sapiens
tggagctgtgtaatg

SEQ ID NO: 74984 - DNA, 15 bp, Homo sapiens
ggagctgtgtaatgt

SEQ ID NO: 74985 - DNA, 15 bp, Homo sapiens
gagctgtgtaatgtc

SEQ ID NO: 74986 - DNA, 15 bp, Homo sapiens
agctgtgtaatgtcc

SEQ ID NO: 74987 - DNA, 15 bp, Homo sapiens
gctgtgtaatgtccg

SEQ ID NO: 74988 - DNA, 15 bp, Homo sapiens
ctgtgtaatgtccga

SEQ ID NO: 74989 - DNA, 15 bp, Homo sapiens
tgtgtaatgtccgac

SEQ ID NO: 74990 - DNA, 15 bp, Homo sapiens
gtgtaatgtccgacc

SEQ ID NO: 74991 - DNA, 15 bp, Homo sapiens
tgtaatgtccgacct

SEQ ID NO: 74992 - DNA, 15 bp, Homo sapiens
gtaatgtccgacctg

SEQ ID NO: 74993 - DNA, 15 bp, Homo sapiens
taatgtccgacctgt

SEQ ID NO: 74994 - DNA, 15 bp, Homo sapiens
aatgtccgacctgtc

SEQ ID NO: 74995 - DNA, 15 bp, Homo sapiens
atgtccgacctgtct

SEQ ID NO: 74996 - DNA, 15 bp, Homo sapiens
tgtccgacctgtctc

SEQ ID NO: 74997 - DNA, 15 bp, Homo sapiens
gtccgacctgtctct

SEQ ID NO: 74998 - DNA, 15 bp, Homo sapiens
tccgacctgtctctg

SEQ ID NO: 74999 - DNA, 15 bp, Homo sapiens
ccgacctgtctctgt

SEQ ID NO: 75000 - DNA, 15 bp, Homo sapiens
cgacctgtctctgtc

SEQ ID NO: 75001 - DNA, 15 bp, Homo sapiens
gacctgtctctgtca

SEQ ID NO: 75002 - DNA, 15 bp, Homo sapiens
acctgtctctgtcaa

SEQ ID NO: 75003 - DNA, 15 bp, Homo sapiens
cctgtctctgtcaat

SEQ ID NO: 75004 - DNA, 15 bp, Homo sapiens
ctgtctctgtcaatg

SEQ ID NO: 75005 - DNA, 15 bp, Homo sapiens
tgtctctgtcaatga

SEQ ID NO: 75006 - DNA, 15 bp, Homo sapiens
gtctctgtcaatgaa

SEQ ID NO: 75007 - DNA, 15 bp, Homo sapiens
tctctgtcaatgaac

SEQ ID NO: 75008 - DNA, 15 bp, Homo sapiens
ctctgtcaatgaaca

SEQ ID NO: 75009 - DNA, 15 bp, Homo sapiens
tctgtcaatgaacag

SEQ ID NO: 75010 - DNA, 15 bp, Homo sapiens
ctgtcaatgaacaga

SEQ ID NO: 75011 - DNA, 15 bp, Homo sapiens
tgtcaatgaacagat

SEQ ID NO: 75012 - DNA, 15 bp, Homo sapiens
gtcaatgaacagatt

SEQ ID NO: 75013 - DNA, 15 bp, Homo sapiens
tcaatgaacagatta

SEQ ID NO: 75014 - DNA, 15 bp, Homo sapiens
caatgaacagattat

SEQ ID NO: 75015 - DNA, 15 bp, Homo sapiens
aatgaacagattatt

SEQ ID NO: 75016 - DNA, 15 bp, Homo sapiens
atgaacagattattc

SEQ ID NO: 75017 - DNA, 15 bp, Homo sapiens
tgaacagattattca

SEQ ID NO: 75018 - DNA, 15 bp, Homo sapiens
gaacagattattcat

SEQ ID NO: 75019 - DNA, 15 bp, Homo sapiens
aacagattattcatt

SEQ ID NO: 75020 - DNA, 15 bp, Homo sapiens
acagattattcattg

SEQ ID NO: 75021 - DNA, 15 bp, Homo sapiens
cagattattcattgt

SEQ ID NO: 75022 - DNA, 15 bp, Homo sapiens
agattattcattgtc

SEQ ID NO: 75023 - DNA, 15 bp, Homo sapiens
gattattcattgtca

SEQ ID NO: 75024 - DNA, 15 bp, Homo sapiens
attattcattgtcat

SEQ ID NO: 75025 - DNA, 15 bp, Homo sapiens
ttattcattgtcatt

SEQ ID NO: 75026 - DNA, 15 bp, Homo sapiens
tattcattgtcattt

SEQ ID NO: 75027 - DNA, 15 bp, Homo sapiens
attcattgtcatttc

SEQ ID NO: 75028 - DNA, 15 bp, Homo sapiens
ttcattgtcatttct

SEQ ID NO: 75029 - DNA, 15 bp, Homo sapiens
tcattgtcatttctc

SEQ ID NO: 75030 - DNA, 15 bp, Homo sapiens
cattgtcatttctca

SEQ ID NO: 75031 - DNA, 15 bp, Homo sapiens
attgtcatttctcat

SEQ ID NO: 75032 - DNA, 15 bp, Homo sapiens
ttgtcatttctcatc

SEQ ID NO: 75033 - DNA, 15 bp, Homo sapiens
tgtcatttctcatct

SEQ ID NO: 75034 - DNA, 15 bp, Homo sapiens
gtcatttctcatctg

SEQ ID NO: 75035 - DNA, 15 bp, Homo sapiens
tcatttctcatctgt

SEQ ID NO: 75036 - DNA, 15 bp, Homo sapiens
catttctcatctgtt

SEQ ID NO: 75037 - DNA, 15 bp, Homo sapiens
atttctcatctgttt

SEQ ID NO: 75038 - DNA, 15 bp, Homo sapiens
tttctcatctgtttt

SEQ ID NO: 75039 - DNA, 15 bp, Homo sapiens
ttctcatctgttttt

SEQ ID NO: 75040 - DNA, 15 bp, Homo sapiens
tctcatctgtttttg

SEQ ID NO: 75041 - DNA, 15 bp, Homo sapiens
ctcatctgtttttga

SEQ ID NO: 75042 - DNA, 15 bp, Homo sapiens
tcatctgtttttgag

SEQ ID NO: 75043 - DNA, 15 bp, Homo sapiens
catctgtttttgaga

SEQ ID NO: 75044 - DNA, 15 bp, Homo sapiens
atctgtttttgagat

SEQ ID NO: 75045 - DNA, 15 bp, Homo sapiens
tctgtttttgagatt

SEQ ID NO: 75046 - DNA, 15 bp, Homo sapiens
ctgtttttgagattg

SEQ ID NO: 75047 - DNA, 15 bp, Homo sapiens
tgtttttgagattgt

SEQ ID NO: 75048 - DNA, 15 bp, Homo sapiens
gtttttgagattgta

SEQ ID NO: 75049 - DNA, 15 bp, Homo sapiens
tttttgagattgtaa

SEQ ID NO: 75050 - DNA, 15 bp, Homo sapiens
ttttgagattgtaac

SEQ ID NO: 75051 - DNA, 15 bp, Homo sapiens
tttgagattgtaact

SEQ ID NO: 75052 - DNA, 15 bp, Homo sapiens
ttgagattgtaactt

SEQ ID NO: 75053 - DNA, 15 bp, Homo sapiens
tgagattgtaacttt

SEQ ID NO: 75054 - DNA, 15 bp, Homo sapiens
gagattgtaactttg

SEQ ID NO: 75055 - DNA, 15 bp, Homo sapiens
agattgtaactttga

SEQ ID NO: 75056 - DNA, 15 bp, Homo sapiens
gattgtaactttgat

SEQ ID NO: 75057 - DNA, 15 bp, Homo sapiens
attgtaactttgatt

SEQ ID NO: 75058 - DNA, 15 bp, Homo sapiens
ttgtaactttgattc

SEQ ID NO: 75059 - DNA, 15 bp, Homo sapiens
tgtaactttgattct

SEQ ID NO: 75060 - DNA, 15 bp, Homo sapiens
gtaactttgattctg

SEQ ID NO: 75061 - DNA, 15 bp, Homo sapiens
taactttgattctgt

SEQ ID NO: 75062 - DNA, 15 bp, Homo sapiens
aactttgattctgta

SEQ ID NO: 75063 - DNA, 15 bp, Homo sapiens
actttgattctgtat

SEQ ID NO: 75064 - DNA, 15 bp, Homo sapiens
ctttgattctgtata

SEQ ID NO: 75065 - DNA, 15 bp, Homo sapiens
tttgattctgtataa

SEQ ID NO: 75066 - DNA, 15 bp, Homo sapiens
ttgattctgtataac

SEQ ID NO: 75067 - DNA, 15 bp, Homo sapiens
tgattctgtataact

SEQ ID NO: 75068 - DNA, 15 bp, Homo sapiens
gattctgtataactc

SEQ ID NO: 75069 - DNA, 15 bp, Homo sapiens
attctgtataactca

SEQ ID NO: 75070 - DNA, 15 bp, Homo sapiens
ttctgtataactcat

SEQ ID NO: 75071 - DNA, 15 bp, Homo sapiens
tctgtataactcata

SEQ ID NO: 75072 - DNA, 15 bp, Homo sapiens
ctgtataactcatag

SEQ ID NO: 75073 - DNA, 15 bp, Homo sapiens
tgtataactcataga

SEQ ID NO: 75074 - DNA, 15 bp, Homo sapiens
gtataactcatagaa

SEQ ID NO: 75075 - DNA, 15 bp, Homo sapiens
tataactcatagaat

SEQ ID NO: 75076 - DNA, 15 bp, Homo sapiens
ataactcatagaatt

SEQ ID NO: 75077 - DNA, 15 bp, Homo sapiens
taactcatagaatta

SEQ ID NO: 75078 - DNA, 15 bp, Homo sapiens
aactcatagaattag

SEQ ID NO: 75079 - DNA, 15 bp, Homo sapiens
actcatagaattagt

SEQ ID NO: 75080 - DNA, 15 bp, Homo sapiens
ctcatagaattagta

SEQ ID NO: 75081 - DNA, 15 bp, Homo sapiens
tcatagaattagtag

SEQ ID NO: 75082 - DNA, 15 bp, Homo sapiens
catagaattagtagt

SEQ ID NO: 75083 - DNA, 15 bp, Homo sapiens
atagaattagtagtt

SEQ ID NO: 75084 - DNA, 15 bp, Homo sapiens
tagaattagtagtta

SEQ ID NO: 75085 - DNA, 15 bp, Homo sapiens
agaattagtagttag

SEQ ID NO: 75086 - DNA, 15 bp, Homo sapiens
gaattagtagttaga

SEQ ID NO: 75087 - DNA, 15 bp, Homo sapiens
aattagtagttagac

SEQ ID NO: 75088 - DNA, 15 bp, Homo sapiens
attagtagttagacc

SEQ ID NO: 75089 - DNA, 15 bp, Homo sapiens
ttagtagttagacct

SEQ ID NO: 75090 - DNA, 15 bp, Homo sapiens
tagtagttagaccta

SEQ ID NO: 75091 - DNA, 15 bp, Homo sapiens
agtagttagacctat

SEQ ID NO: 75092 - DNA, 15 bp, Homo sapiens
gtagttagacctata

SEQ ID NO: 75093 - DNA, 15 bp, Homo sapiens
tagttagacctatat

SEQ ID NO: 75094 - DNA, 15 bp, Homo sapiens
agttagacctatata

SEQ ID NO: 75095 - DNA, 15 bp, Homo sapiens
gttagacctatatat

SEQ ID NO: 75096 - DNA, 15 bp, Homo sapiens
ttagacctatatatg

SEQ ID NO: 75097 - DNA, 15 bp, Homo sapiens
tagacctatatatgt

SEQ ID NO: 75098 - DNA, 15 bp, Homo sapiens
agacctatatatgtt

SEQ ID NO: 75099 - DNA, 15 bp, Homo sapiens
gacctatatatgtta

SEQ ID NO: 75100 - DNA, 15 bp, Homo sapiens
acctatatatgttag

SEQ ID NO: 75101 - DNA, 15 bp, Homo sapiens
cctatatatgttagt

SEQ ID NO: 75102 - DNA, 15 bp, Homo sapiens
ctatatatgttagtt

SEQ ID NO: 75103 - DNA, 15 bp, Homo sapiens
tatatatgttagtta

SEQ ID NO: 75104 - DNA, 15 bp, Homo sapiens
atatatgttagttat

SEQ ID NO: 75105 - DNA, 15 bp, Homo sapiens
tatatgttagttatt

SEQ ID NO: 75106 - DNA, 15 bp, Homo sapiens
atatgttagttatta

SEQ ID NO: 75107 - DNA, 15 bp, Homo sapiens
tatgttagttattac

SEQ ID NO: 75108 - DNA, 15 bp, Homo sapiens
atgttagttattaca

SEQ ID NO: 75109 - DNA, 15 bp, Homo sapiens
tgttagttattacat

SEQ ID NO: 75110 - DNA, 15 bp, Homo sapiens
gttagttattacatt

SEQ ID NO: 75111 - DNA, 15 bp, Homo sapiens
ttagttattacatta

SEQ ID NO: 75112 - DNA, 15 bp, Homo sapiens
tagttattacattat

SEQ ID NO: 75113 - DNA, 15 bp, Homo sapiens
agttattacattatt

SEQ ID NO: 75114 - DNA, 15 bp, Homo sapiens
gttattacattattt

SEQ ID NO: 75115 - DNA, 15 bp, Homo sapiens
ttattacattatttg

SEQ ID NO: 75116 - DNA, 15 bp, Homo sapiens
tattacattatttgt

SEQ ID NO: 75117 - DNA, 15 bp, Homo sapiens
attacattatttgta

SEQ ID NO: 75118 - DNA, 15 bp, Homo sapiens
ttacattatttgtat

SEQ ID NO: 75119 - DNA, 15 bp, Homo sapiens
tacattatttgtata

SEQ ID NO: 75120 - DNA, 15 bp, Homo sapiens
acattatttgtatat

SEQ ID NO: 75121 - DNA, 15 bp, Homo sapiens
cattatttgtatatg

SEQ ID NO: 75122 - DNA, 15 bp, Homo sapiens
attatttgtatatgt

SEQ ID NO: 75123 - DNA, 15 bp, Homo sapiens
ttatttgtatatgta

SEQ ID NO: 75124 - DNA, 15 bp, Homo sapiens
tatttgtatatgtac

SEQ ID NO: 75125 - DNA, 15 bp, Homo sapiens
atttgtatatgtaca

SEQ ID NO: 75126 - DNA, 15 bp, Homo sapiens
tttgtatatgtacag

SEQ ID NO: 75127 - DNA, 15 bp, Homo sapiens
ttgtatatgtacaga

SEQ ID NO: 75128 - DNA, 15 bp, Homo sapiens
tgtatatgtacagac

SEQ ID NO: 75129 - DNA, 15 bp, Homo sapiens
gtatatgtacagact

SEQ ID NO: 75130 - DNA, 15 bp, Homo sapiens
tatatgtacagactg

SEQ ID NO: 75131 - DNA, 15 bp, Homo sapiens
atatgtacagactgc

SEQ ID NO: 75132 - DNA, 15 bp, Homo sapiens
tatgtacagactgct

SEQ ID NO: 75133 - DNA, 15 bp, Homo sapiens
atgtacagactgctt

SEQ ID NO: 75134 - DNA, 15 bp, Homo sapiens
tgtacagactgcttt

SEQ ID NO: 75135 - DNA, 15 bp, Homo sapiens
gtacagactgcttta

SEQ ID NO: 75136 - DNA, 15 bp, Homo sapiens
tacagactgctttag

SEQ ID NO: 75137 - DNA, 15 bp, Homo sapiens
acagactgctttaga

SEQ ID NO: 75138 - DNA, 15 bp, Homo sapiens
cagactgctttagac

SEQ ID NO: 75139 - DNA, 15 bp, Homo sapiens
agactgctttagaca

SEQ ID NO: 75140 - DNA, 15 bp, Homo sapiens
gactgctttagacaa

SEQ ID NO: 75141 - DNA, 15 bp, Homo sapiens
actgctttagacaat

SEQ ID NO: 75142 - DNA, 15 bp, Homo sapiens
ctgctttagacaata

SEQ ID NO: 75143 - DNA, 15 bp, Homo sapiens
tgctttagacaatat

SEQ ID NO: 75144 - DNA, 15 bp, Homo sapiens
gctttagacaatatt

SEQ ID NO: 75145 - DNA, 15 bp, Homo sapiens
ctttagacaatattg

SEQ ID NO: 75146 - DNA, 15 bp, Homo sapiens
tttagacaatattgt

SEQ ID NO: 75147 - DNA, 15 bp, Homo sapiens
ttagacaatattgta

SEQ ID NO: 75148 - DNA, 15 bp, Homo sapiens
tagacaatattgtag

SEQ ID NO: 75149 - DNA, 15 bp, Homo sapiens
agacaatattgtagt

SEQ ID NO: 75150 - DNA, 15 bp, Homo sapiens
gacaatattgtagtg

SEQ ID NO: 75151 - DNA, 15 bp, Homo sapiens
acaatattgtagtgt

SEQ ID NO: 75152 - DNA, 15 bp, Homo sapiens
caatattgtagtgtt

SEQ ID NO: 75153 - DNA, 15 bp, Homo sapiens
aatattgtagtgtta

SEQ ID NO: 75154 - DNA, 15 bp, Homo sapiens
atattgtagtgttat

SEQ ID NO: 75155 - DNA, 15 bp, Homo sapiens
tattgtagtgttata

SEQ ID NO: 75156 - DNA, 15 bp, Homo sapiens
attgtagtgttatat

SEQ ID NO: 75157 - DNA, 15 bp, Homo sapiens
ttgtagtgttatatg

SEQ ID NO: 75158 - DNA, 15 bp, Homo sapiens
tgtagtgttatatgt

SEQ ID NO: 75159 - DNA, 15 bp, Homo sapiens
gtagtgttatatgtt

SEQ ID NO: 75160 - DNA, 15 bp, Homo sapiens
tagtgttatatgtta

SEQ ID NO: 75161 - DNA, 15 bp, Homo sapiens
agtgttatatgttaa

SEQ ID NO: 75162 - DNA, 15 bp, Homo sapiens
gtgttatatgttaat

SEQ ID NO: 75163 - DNA, 15 bp, Homo sapiens
tgttatatgttaatt

SEQ ID NO: 75164 - DNA, 15 bp, Homo sapiens
gttatatgttaattt

SEQ ID NO: 75165 - DNA, 15 bp, Homo sapiens
ttatatgttaatttt

SEQ ID NO: 75166 - DNA, 15 bp, Homo sapiens
tatatgttaatttta

SEQ ID NO: 75167 - DNA, 15 bp, Homo sapiens
atatgttaattttat

SEQ ID NO: 75168 - DNA, 15 bp, Homo sapiens
tatgttaattttatc

SEQ ID NO: 75169 - DNA, 15 bp, Homo sapiens
atgttaattttatca

SEQ ID NO: 75170 - DNA, 15 bp, Homo sapiens
tgttaattttatcaa

SEQ ID NO: 75171 - DNA, 15 bp, Homo sapiens
gttaattttatcaat

SEQ ID NO: 75172 - DNA, 15 bp, Homo sapiens
ttaattttatcaatt

SEQ ID NO: 75173 - DNA, 15 bp, Homo sapiens
taattttatcaatta

SEQ ID NO: 75174 - DNA, 15 bp, Homo sapiens
aattttatcaattaa

SEQ ID NO: 75175 - DNA, 15 bp, Homo sapiens
attttatcaattaaa

SEQ ID NO: 75176 - DNA, 15 bp, Homo sapiens
ttttatcaattaaaa

SEQ ID NO: 75177 - DNA, 15 bp, Homo sapiens
tttatcaattaaaat

SEQ ID NO: 75178 - DNA, 15 bp, Homo sapiens
ttatcaattaaaatg

SEQ ID NO: 75179 - DNA, 15 bp, Homo sapiens
tatcaattaaaatgt

SEQ ID NO: 75180 - DNA, 15 bp, Homo sapiens
atcaattaaaatgtg

SEQ ID NO: 75181 - DNA, 15 bp, Homo sapiens
tcaattaaaatgtgc

SEQ ID NO: 75182 - DNA, 15 bp, Homo sapiens
caattaaaatgtgct

SEQ ID NO: 75183 - DNA, 15 bp, Homo sapiens
aattaaaatgtgcta

SEQ ID NO: 75184 - DNA, 15 bp, Homo sapiens
attaaaatgtgctat

SEQ ID NO: 75185 - DNA, 15 bp, Homo sapiens
ttaaaatgtgctata

SEQ ID NO: 75186 - DNA, 15 bp, Homo sapiens
taaaatgtgctatag

SEQ ID NO: 75187 - DNA, 15 bp, Homo sapiens
aaaatgtgctatagg

SEQ ID NO: 75188 - DNA, 15 bp, Homo sapiens
aaatgtgctatagga

SEQ ID NO: 75189 - DNA, 15 bp, Homo sapiens
aatgtgctataggat

SEQ ID NO: 75190 - DNA, 15 bp, Homo sapiens
atgtgctataggatc

SEQ ID NO: 75191 - DNA, 15 bp, Homo sapiens
tgtgctataggatca

SEQ ID NO: 75192 - DNA, 15 bp, Homo sapiens
gtgctataggatcat

SEQ ID NO: 75193 - DNA, 15 bp, Homo sapiens
tgctataggatcatt

SEQ ID NO: 75194 - DNA, 15 bp, Homo sapiens
gctataggatcattg

SEQ ID NO: 75195 - DNA, 15 bp, Homo sapiens
ctataggatcattgt

SEQ ID NO: 75196 - DNA, 15 bp, Homo sapiens
tataggatcattgta

SEQ ID NO: 75197 - DNA, 15 bp, Homo sapiens
ataggatcattgtag

SEQ ID NO: 75198 - DNA, 15 bp, Homo sapiens
taggatcattgtaga

SEQ ID NO: 75199 - DNA, 15 bp, Homo sapiens
aggatcattgtagag

SEQ ID NO: 75200 - DNA, 15 bp, Homo sapiens
ggatcattgtagaga

SEQ ID NO: 75201 - DNA, 15 bp, Homo sapiens
gatcattgtagagat

SEQ ID NO: 75202 - DNA, 15 bp, Homo sapiens
atcattgtagagatc

SEQ ID NO: 75203 - DNA, 15 bp, Homo sapiens
tcattgtagagatct

SEQ ID NO: 75204 - DNA, 15 bp, Homo sapiens
cattgtagagatctt

SEQ ID NO: 75205 - DNA, 15 bp, Homo sapiens
attgtagagatcttg

SEQ ID NO: 75206 - DNA, 15 bp, Homo sapiens
ttgtagagatcttgt

SEQ ID NO: 75207 - DNA, 15 bp, Homo sapiens
tgtagagatcttgtc

SEQ ID NO: 75208 - DNA, 15 bp, Homo sapiens
gtagagatcttgtct

SEQ ID NO: 75209 - DNA, 15 bp, Homo sapiens
tagagatcttgtctc

SEQ ID NO: 75210 - DNA, 15 bp, Homo sapiens
agagatcttgtctct

SEQ ID NO: 75211 - DNA, 15 bp, Homo sapiens
gagatcttgtctcta

SEQ ID NO: 75212 - DNA, 15 bp, Homo sapiens
agatcttgtctctaa

SEQ ID NO: 75213 - DNA, 15 bp, Homo sapiens
gatcttgtctctaat

SEQ ID NO: 75214 - DNA, 15 bp, Homo sapiens
atcttgtctctaatt

SEQ ID NO: 75215 - DNA, 15 bp, Homo sapiens
tcttgtctctaatta

SEQ ID NO: 75216 - DNA, 15 bp, Homo sapiens
cttgtctctaattaa

SEQ ID NO: 75217 - DNA, 15 bp, Homo sapiens
ttgtctctaattaac

SEQ ID NO: 75218 - DNA, 15 bp, Homo sapiens
tgtctctaattaaca

SEQ ID NO: 75219 - DNA, 15 bp, Homo sapiens
gtctctaattaacag

SEQ ID NO: 75220 - DNA, 15 bp, Homo sapiens
tctctaattaacagg

SEQ ID NO: 75221 - DNA, 15 bp, Homo sapiens
ctctaattaacagga

SEQ ID NO: 75222 - DNA, 15 bp, Homo sapiens
tctaattaacaggat

SEQ ID NO: 75223 - DNA, 15 bp, Homo sapiens
ctaattaacaggatt

SEQ ID NO: 75224 - DNA, 15 bp, Homo sapiens
taattaacaggattc

SEQ ID NO: 75225 - DNA, 15 bp, Homo sapiens
aattaacaggattca

SEQ ID NO: 75226 - DNA, 15 bp, Homo sapiens
attaacaggattcat

SEQ ID NO: 75227 - DNA, 15 bp, Homo sapiens
ttaacaggattcata

SEQ ID NO: 75228 - DNA, 15 bp, Homo sapiens
taacaggattcataa

SEQ ID NO: 75229 - DNA, 15 bp, Homo sapiens
aacaggattcataaa

SEQ ID NO: 75230 - DNA, 15 bp, Homo sapiens
acaggattcataaag

SEQ ID NO: 75231 - DNA, 15 bp, Homo sapiens
caggattcataaaga

SEQ ID NO: 75232 - DNA, 15 bp, Homo sapiens
aggattcataaagag

SEQ ID NO: 75233 - DNA, 15 bp, Homo sapiens
ggattcataaagaga

SEQ ID NO: 75234 - DNA, 15 bp, Homo sapiens
gattcataaagagaa

SEQ ID NO: 75235 - DNA, 15 bp, Homo sapiens
attcataaagagaaa

SEQ ID NO: 75236 - DNA, 15 bp, Homo sapiens
ttcataaagagaaaa

SEQ ID NO: 75237 - DNA, 15 bp, Homo sapiens
tcataaagagaaaac

SEQ ID NO: 75238 - DNA, 15 bp, Homo sapiens
cataaagagaaaaca

SEQ ID NO: 75239 - DNA, 15 bp, Homo sapiens
ataaagagaaaacaa

SEQ ID NO: 75240 - DNA, 15 bp, Homo sapiens
taaagagaaaacaaa

SEQ ID NO: 75241 - DNA, 15 bp, Homo sapiens
aaagagaaaacaaag

SEQ ID NO: 75242 - DNA, 15 bp, Homo sapiens
aagagaaaacaaagg

SEQ ID NO: 75243 - DNA, 15 bp, Homo sapiens
agagaaaacaaagga

SEQ ID NO: 75244 - DNA, 15 bp, Homo sapiens
gagaaaacaaaggag

SEQ ID NO: 75245 - DNA, 15 bp, Homo sapiens
agaaaacaaaggaga

SEQ ID NO: 75246 - DNA, 15 bp, Homo sapiens
gaaaacaaaggagag

SEQ ID NO: 75247 - DNA, 15 bp, Homo sapiens
aaaacaaaggagaga

SEQ ID NO: 75248 - DNA, 15 bp, Homo sapiens
aaacaaaggagagaa

SEQ ID NO: 75249 - DNA, 15 bp, Homo sapiens
aacaaaggagagaaa

SEQ ID NO: 75250 - DNA, 15 bp, Homo sapiens
acaaaggagagaaac

SEQ ID NO: 75251 - DNA, 15 bp, Homo sapiens
caaaggagagaaaca

SEQ ID NO: 75252 - DNA, 15 bp, Homo sapiens
aaaggagagaaacat

SEQ ID NO: 75253 - DNA, 15 bp, Homo sapiens
aaggagagaaacatc

SEQ ID NO: 75254 - DNA, 15 bp, Homo sapiens
aggagagaaacatcc

SEQ ID NO: 75255 - DNA, 15 bp, Homo sapiens
ggagagaaacatcca

SEQ ID NO: 75256 - DNA, 15 bp, Homo sapiens
gagagaaacatccag

SEQ ID NO: 75257 - DNA, 15 bp, Homo sapiens
agagaaacatccaga

SEQ ID NO: 75258 - DNA, 15 bp, Homo sapiens
gagaaacatccagat

SEQ ID NO: 75259 - DNA, 15 bp, Homo sapiens
agaaacatccagatt

SEQ ID NO: 75260 - DNA, 15 bp, Homo sapiens
gaaacatccagattg

SEQ ID NO: 75261 - DNA, 15 bp, Homo sapiens
aaacatccagattga

SEQ ID NO: 75262 - DNA, 15 bp, Homo sapiens
aacatccagattgaa

SEQ ID NO: 75263 - DNA, 15 bp, Homo sapiens
acatccagattgaaa

SEQ ID NO: 75264 - DNA, 15 bp, Homo sapiens
catccagattgaaaa

SEQ ID NO: 75265 - DNA, 15 bp, Homo sapiens
atccagattgaaaag

SEQ ID NO: 75266 - DNA, 15 bp, Homo sapiens
tccagattgaaaaga

SEQ ID NO: 75267 - DNA, 15 bp, Homo sapiens
ccagattgaaaagac

SEQ ID NO: 75268 - DNA, 15 bp, Homo sapiens
cagattgaaaagacc

SEQ ID NO: 75269 - DNA, 15 bp, Homo sapiens
agattgaaaagacct

SEQ ID NO: 75270 - DNA, 15 bp, Homo sapiens
gattgaaaagaccta

SEQ ID NO: 75271 - DNA, 15 bp, Homo sapiens
attgaaaagacctac

SEQ ID NO: 75272 - DNA, 15 bp, Homo sapiens
ttgaaaagacctaca

SEQ ID NO: 75273 - DNA, 15 bp, Homo sapiens
tgaaaagacctacat

SEQ ID NO: 75274 - DNA, 15 bp, Homo sapiens
gaaaagacctacata

SEQ ID NO: 75275 - DNA, 15 bp, Homo sapiens
aaaagacctacatag

SEQ ID NO: 75276 - DNA, 15 bp, Homo sapiens
aaagacctacatagt

SEQ ID NO: 75277 - DNA, 15 bp, Homo sapiens
aagacctacatagtg

SEQ ID NO: 75278 - DNA, 15 bp, Homo sapiens
agacctacatagtgc

SEQ ID NO: 75279 - DNA, 15 bp, Homo sapiens
gacctacatagtgcc

SEQ ID NO: 75280 - DNA, 15 bp, Homo sapiens
acctacatagtgcca

SEQ ID NO: 75281 - DNA, 15 bp, Homo sapiens
cctacatagtgccaa

SEQ ID NO: 75282 - DNA, 15 bp, Homo sapiens
ctacatagtgccaag

SEQ ID NO: 75283 - DNA, 15 bp, Homo sapiens
tacatagtgccaagc

SEQ ID NO: 75284 - DNA, 15 bp, Homo sapiens
acatagtgccaagca

SEQ ID NO: 75285 - DNA, 15 bp, Homo sapiens
catagtgccaagcac

SEQ ID NO: 75286 - DNA, 15 bp, Homo sapiens
atagtgccaagcaca

SEQ ID NO: 75287 - DNA, 15 bp, Homo sapiens
tagtgccaagcacaa

SEQ ID NO: 75288 - DNA, 15 bp, Homo sapiens
agtgccaagcacaat

SEQ ID NO: 75289 - DNA, 15 bp, Homo sapiens
gtgccaagcacaata

SEQ ID NO: 75290 - DNA, 15 bp, Homo sapiens
tgccaagcacaataa

SEQ ID NO: 75291 - DNA, 15 bp, Homo sapiens
gccaagcacaataaa

SEQ ID NO: 75292 - DNA, 15 bp, Homo sapiens
ccaagcacaataaaa

SEQ ID NO: 75293 - DNA, 15 bp, Homo sapiens
caagcacaataaaag

SEQ ID NO: 75294 - DNA, 15 bp, Homo sapiens
aagcacaataaaaga

SEQ ID NO: 75295 - DNA, 15 bp, Homo sapiens
agcacaataaaagaa

SEQ ID NO: 75296 - DNA, 15 bp, Homo sapiens
gcacaataaaagaaa

SEQ ID NO: 75297 - DNA, 15 bp, Homo sapiens
cacaataaaagaaac

SEQ ID NO: 75298 - DNA, 15 bp, Homo sapiens
acaataaaagaaacc

SEQ ID NO: 75299 - DNA, 15 bp, Homo sapiens
caataaaagaaaccc

SEQ ID NO: 75300 - DNA, 15 bp, Homo sapiens
aataaaagaaaccct

SEQ ID NO: 75301 - DNA, 15 bp, Homo sapiens
ataaaagaaacccta

SEQ ID NO: 75302 - DNA, 15 bp, Homo sapiens
taaaagaaaccctat

SEQ ID NO: 75303 - DNA, 15 bp, Homo sapiens
aaaagaaaccctata

SEQ ID NO: 75304 - DNA, 15 bp, Homo sapiens
aaagaaaccctatac

SEQ ID NO: 75305 - DNA, 15 bp, Homo sapiens
aagaaaccctatact

SEQ ID NO: 75306 - DNA, 15 bp, Homo sapiens
agaaaccctatacta

SEQ ID NO: 75307 - DNA, 15 bp, Homo sapiens
gaaaccctatactag

SEQ ID NO: 75308 - DNA, 15 bp, Homo sapiens
aaaccctatactagg

SEQ ID NO: 75309 - DNA, 15 bp, Homo sapiens
aaccctatactaggc

SEQ ID NO: 75310 - DNA, 15 bp, Homo sapiens
accctatactaggca

SEQ ID NO: 75311 - DNA, 15 bp, Homo sapiens
ccctatactaggcaa

SEQ ID NO: 75312 - DNA, 15 bp, Homo sapiens
cctatactaggcaaa

SEQ ID NO: 75313 - DNA, 15 bp, Homo sapiens
ctatactaggcaaat

SEQ ID NO: 75314 - DNA, 15 bp, Homo sapiens
tatactaggcaaatt

SEQ ID NO: 75315 - DNA, 15 bp, Homo sapiens
atactaggcaaatta

SEQ ID NO: 75316 - DNA, 15 bp, Homo sapiens
tactaggcaaattat

SEQ ID NO: 75317 - DNA, 15 bp, Homo sapiens
actaggcaaattatt

SEQ ID NO: 75318 - DNA, 15 bp, Homo sapiens
ctaggcaaattatta

SEQ ID NO: 75319 - DNA, 15 bp, Homo sapiens
taggcaaattattat

SEQ ID NO: 75320 - DNA, 15 bp, Homo sapiens
aggcaaattattatg

SEQ ID NO: 75321 - DNA, 15 bp, Homo sapiens
ggcaaattattatga

SEQ ID NO: 75322 - DNA, 15 bp, Homo sapiens
gcaaattattatgaa

SEQ ID NO: 75323 - DNA, 15 bp, Homo sapiens
caaattattatgaaa

SEQ ID NO: 75324 - DNA, 15 bp, Homo sapiens
aaattattatgaaat

SEQ ID NO: 75325 - DNA, 15 bp, Homo sapiens
aattattatgaaatt

SEQ ID NO: 75326 - DNA, 15 bp, Homo sapiens
attattatgaaattt

SEQ ID NO: 75327 - DNA, 15 bp, Homo sapiens
ttattatgaaatttg

SEQ ID NO: 75328 - DNA, 15 bp, Homo sapiens
tattatgaaatttgt

SEQ ID NO: 75329 - DNA, 15 bp, Homo sapiens
attatgaaatttgtt

SEQ ID NO: 75330 - DNA, 15 bp, Homo sapiens
ttatgaaatttgttt

SEQ ID NO: 75331 - DNA, 15 bp, Homo sapiens
tatgaaatttgtttt

SEQ ID NO: 75332 - DNA, 15 bp, Homo sapiens
atgaaatttgtttta

SEQ ID NO: 75333 - DNA, 15 bp, Homo sapiens
tgaaatttgttttag

SEQ ID NO: 75334 - DNA, 15 bp, Homo sapiens
gaaatttgttttagg

SEQ ID NO: 75335 - DNA, 15 bp, Homo sapiens
aaatttgttttagga

SEQ ID NO: 75336 - DNA, 15 bp, Homo sapiens
aatttgttttaggac

SEQ ID NO: 75337 - DNA, 15 bp, Homo sapiens
atttgttttaggaca

SEQ ID NO: 75338 - DNA, 15 bp, Homo sapiens
tttgttttaggacac

SEQ ID NO: 75339 - DNA, 15 bp, Homo sapiens
ttgttttaggacacc

SEQ ID NO: 75340 - DNA, 15 bp, Homo sapiens
tgttttaggacacca

SEQ ID NO: 75341 - DNA, 15 bp, Homo sapiens
gttttaggacaccag

SEQ ID NO: 75342 - DNA, 15 bp, Homo sapiens
ttttaggacaccaga

SEQ ID NO: 75343 - DNA, 15 bp, Homo sapiens
tttaggacaccagaa

SEQ ID NO: 75344 - DNA, 15 bp, Homo sapiens
ttaggacaccagaaa

SEQ ID NO: 75345 - DNA, 15 bp, Homo sapiens
taggacaccagaaat

SEQ ID NO: 75346 - DNA, 15 bp, Homo sapiens
aggacaccagaaata

SEQ ID NO: 75347 - DNA, 15 bp, Homo sapiens
ggacaccagaaataa

SEQ ID NO: 75348 - DNA, 15 bp, Homo sapiens
gacaccagaaataaa

SEQ ID NO: 75349 - DNA, 15 bp, Homo sapiens
acaccagaaataaag

SEQ ID NO: 75350 - DNA, 15 bp, Homo sapiens
caccagaaataaaga

SEQ ID NO: 75351 - DNA, 15 bp, Homo sapiens
accagaaataaagat

SEQ ID NO: 75352 - DNA, 15 bp, Homo sapiens
ccagaaataaagata

SEQ ID NO: 75353 - DNA, 15 bp, Homo sapiens
cagaaataaagataa

SEQ ID NO: 75354 - DNA, 15 bp, Homo sapiens
agaaataaagataat

SEQ ID NO: 75355 - DNA, 15 bp, Homo sapiens
gaaataaagataata

SEQ ID NO: 75356 - DNA, 15 bp, Homo sapiens
aaataaagataatat

SEQ ID NO: 75357 - DNA, 15 bp, Homo sapiens
aataaagataatatc

SEQ ID NO: 75358 - DNA, 15 bp, Homo sapiens
ataaagataatatct

SEQ ID NO: 75359 - DNA, 15 bp, Homo sapiens
taaagataatatcta

SEQ ID NO: 75360 - DNA, 15 bp, Homo sapiens
aaagataatatctaa

SEQ ID NO: 75361 - DNA, 15 bp, Homo sapiens
aagataatatctaaa

SEQ ID NO: 75362 - DNA, 15 bp, Homo sapiens
agataatatctaaaa

SEQ ID NO: 75363 - DNA, 15 bp, Homo sapiens
gataatatctaaaaa

SEQ ID NO: 75364 - DNA, 15 bp, Homo sapiens
ataatatctaaaaac

SEQ ID NO: 75365 - DNA, 15 bp, Homo sapiens
taatatctaaaaact

SEQ ID NO: 75366 - DNA, 15 bp, Homo sapiens
aatatctaaaaactt

SEQ ID NO: 75367 - DNA, 15 bp, Homo sapiens
atatctaaaaacttt

SEQ ID NO: 75368 - DNA, 15 bp, Homo sapiens
tatctaaaaactttt

SEQ ID NO: 75369 - DNA, 15 bp, Homo sapiens
atctaaaaacttttt

SEQ ID NO: 75370 - DNA, 15 bp, Homo sapiens
tctaaaaacttttta

SEQ ID NO: 75371 - DNA, 15 bp, Homo sapiens
ctaaaaactttttag

SEQ ID NO: 75372 - DNA, 15 bp, Homo sapiens
taaaaactttttaga

SEQ ID NO: 75373 - DNA, 15 bp, Homo sapiens
aaaaactttttagaa

SEQ ID NO: 75374 - DNA, 15 bp, Homo sapiens
aaaactttttagaat

SEQ ID NO: 75375 - DNA, 15 bp, Homo sapiens
aaactttttagaatc

SEQ ID NO: 75376 - DNA, 15 bp, Homo sapiens
aactttttagaatcg

SEQ ID NO: 75377 - DNA, 15 bp, Homo sapiens
actttttagaatcgc

SEQ ID NO: 75378 - DNA, 15 bp, Homo sapiens
ctttttagaatcgcc

SEQ ID NO: 75379 - DNA, 15 bp, Homo sapiens
tttttagaatcgcct

SEQ ID NO: 75380 - DNA, 15 bp, Homo sapiens
ttttagaatcgccta

SEQ ID NO: 75381 - DNA, 15 bp, Homo sapiens
tttagaatcgcctag

SEQ ID NO: 75382 - DNA, 15 bp, Homo sapiens
ttagaatcgcctagg

SEQ ID NO: 75383 - DNA, 15 bp, Homo sapiens
tagaatcgcctagga

SEQ ID NO: 75384 - DNA, 15 bp, Homo sapiens
agaatcgcctaggag

SEQ ID NO: 75385 - DNA, 15 bp, Homo sapiens
gaatcgcctaggagg

SEQ ID NO: 75386 - DNA, 15 bp, Homo sapiens
aatcgcctaggaggg

SEQ ID NO: 75387 - DNA, 15 bp, Homo sapiens
atcgcctaggaggga

SEQ ID NO: 75388 - DNA, 15 bp, Homo sapiens
tcgcctaggagggat

SEQ ID NO: 75389 - DNA, 15 bp, Homo sapiens
cgcctaggagggatt

SEQ ID NO: 75390 - DNA, 15 bp, Homo sapiens
gcctaggagggatta

SEQ ID NO: 75391 - DNA, 15 bp, Homo sapiens
cctaggagggattag

SEQ ID NO: 75392 - DNA, 15 bp, Homo sapiens
ctaggagggattagg

SEQ ID NO: 75393 - DNA, 15 bp, Homo sapiens
taggagggattagga

SEQ ID NO: 75394 - DNA, 15 bp, Homo sapiens
aggagggattaggaa

SEQ ID NO: 75395 - DNA, 15 bp, Homo sapiens
ggagggattaggaat

SEQ ID NO: 75396 - DNA, 15 bp, Homo sapiens
gagggattaggaata

SEQ ID NO: 75397 - DNA, 15 bp, Homo sapiens
agggattaggaatat

SEQ ID NO: 75398 - DNA, 15 bp, Homo sapiens
gggattaggaatatg

SEQ ID NO: 75399 - DNA, 15 bp, Homo sapiens
ggattaggaatatga

SEQ ID NO: 75400 - DNA, 15 bp, Homo sapiens
gattaggaatatgaa

SEQ ID NO: 75401 - DNA, 15 bp, Homo sapiens
attaggaatatgaat

SEQ ID NO: 75402 - DNA, 15 bp, Homo sapiens
ttaggaatatgaata

SEQ ID NO: 75403 - DNA, 15 bp, Homo sapiens
taggaatatgaatag

SEQ ID NO: 75404 - DNA, 15 bp, Homo sapiens
aggaatatgaatagc

SEQ ID NO: 75405 - DNA, 15 bp, Homo sapiens
ggaatatgaatagca

SEQ ID NO: 75406 - DNA, 15 bp, Homo sapiens
gaatatgaatagcat

SEQ ID NO: 75407 - DNA, 15 bp, Homo sapiens
aatatgaatagcatc

SEQ ID NO: 75408 - DNA, 15 bp, Homo sapiens
atatgaatagcatct

SEQ ID NO: 75409 - DNA, 15 bp, Homo sapiens
tatgaatagcatcta

SEQ ID NO: 75410 - DNA, 15 bp, Homo sapiens
atgaatagcatctaa

SEQ ID NO: 75411 - DNA, 15 bp, Homo sapiens
tgaatagcatctaac

SEQ ID NO: 75412 - DNA, 15 bp, Homo sapiens
gaatagcatctaact

SEQ ID NO: 75413 - DNA, 15 bp, Homo sapiens
aatagcatctaactt

SEQ ID NO: 75414 - DNA, 15 bp, Homo sapiens
atagcatctaacttg

SEQ ID NO: 75415 - DNA, 15 bp, Homo sapiens
tagcatctaacttgt

SEQ ID NO: 75416 - DNA, 15 bp, Homo sapiens
agcatctaacttgtt

SEQ ID NO: 75417 - DNA, 15 bp, Homo sapiens
gcatctaacttgttg

SEQ ID NO: 75418 - DNA, 15 bp, Homo sapiens
catctaacttgttgg

SEQ ID NO: 75419 - DNA, 15 bp, Homo sapiens
atctaacttgttggc

SEQ ID NO: 75420 - DNA, 15 bp, Homo sapiens
tctaacttgttggca

SEQ ID NO: 75421 - DNA, 15 bp, Homo sapiens
ctaacttgttggcag

SEQ ID NO: 75422 - DNA, 15 bp, Homo sapiens
taacttgttggcagt

SEQ ID NO: 75423 - DNA, 15 bp, Homo sapiens
aacttgttggcagta

SEQ ID NO: 75424 - DNA, 15 bp, Homo sapiens
acttgttggcagtag

SEQ ID NO: 75425 - DNA, 15 bp, Homo sapiens
cttgttggcagtaga

SEQ ID NO: 75426 - DNA, 15 bp, Homo sapiens
ttgttggcagtagaa

SEQ ID NO: 75427 - DNA, 15 bp, Homo sapiens
tgttggcagtagaat

SEQ ID NO: 75428 - DNA, 15 bp, Homo sapiens
gttggcagtagaatt

SEQ ID NO: 75429 - DNA, 15 bp, Homo sapiens
ttggcagtagaattg

SEQ ID NO: 75430 - DNA, 15 bp, Homo sapiens
tggcagtagaattga

SEQ ID NO: 75431 - DNA, 15 bp, Homo sapiens
ggcagtagaattgaa

SEQ ID NO: 75432 - DNA, 15 bp, Homo sapiens
gcagtagaattgaag

SEQ ID NO: 75433 - DNA, 15 bp, Homo sapiens
cagtagaattgaagg

SEQ ID NO: 75434 - DNA, 15 bp, Homo sapiens
agtagaattgaaggt

SEQ ID NO: 75435 - DNA, 15 bp, Homo sapiens
gtagaattgaaggta

SEQ ID NO: 75436 - DNA, 15 bp, Homo sapiens
tagaattgaaggtag

SEQ ID NO: 75437 - DNA, 15 bp, Homo sapiens
agaattgaaggtaga

SEQ ID NO: 75438 - DNA, 15 bp, Homo sapiens
gaattgaaggtagaa

SEQ ID NO: 75439 - DNA, 15 bp, Homo sapiens
aattgaaggtagaag

SEQ ID NO: 75440 - DNA, 15 bp, Homo sapiens
attgaaggtagaagg

SEQ ID NO: 75441 - DNA, 15 bp, Homo sapiens
ttgaaggtagaaggt

SEQ ID NO: 75442 - DNA, 15 bp, Homo sapiens
tgaaggtagaaggtg

SEQ ID NO: 75443 - DNA, 15 bp, Homo sapiens
gaaggtagaaggtgg

SEQ ID NO: 75444 - DNA, 15 bp, Homo sapiens
aaggtagaaggtggt

SEQ ID NO: 75445 - DNA, 15 bp, Homo sapiens
aggtagaaggtggta

SEQ ID NO: 75446 - DNA, 15 bp, Homo sapiens
ggtagaaggtggtaa

SEQ ID NO: 75447 - DNA, 15 bp, Homo sapiens
gtagaaggtggtaaa

SEQ ID NO: 75448 - DNA, 15 bp, Homo sapiens
tagaaggtggtaaaa

SEQ ID NO: 75449 - DNA, 15 bp, Homo sapiens
agaaggtggtaaaac

SEQ ID NO: 75450 - DNA, 15 bp, Homo sapiens
gaaggtggtaaaaca

SEQ ID NO: 75451 - DNA, 15 bp, Homo sapiens
aaggtggtaaaacat

SEQ ID NO: 75452 - DNA, 15 bp, Homo sapiens
aggtggtaaaacatc

SEQ ID NO: 75453 - DNA, 15 bp, Homo sapiens
ggtggtaaaacatca

SEQ ID NO: 75454 - DNA, 15 bp, Homo sapiens
gtggtaaaacatcac

SEQ ID NO: 75455 - DNA, 15 bp, Homo sapiens
tggtaaaacatcacc

SEQ ID NO: 75456 - DNA, 15 bp, Homo sapiens
ggtaaaacatcacct

SEQ ID NO: 75457 - DNA, 15 bp, Homo sapiens
gtaaaacatcacctt

SEQ ID NO: 75458 - DNA, 15 bp, Homo sapiens
taaaacatcaccttg

SEQ ID NO: 75459 - DNA, 15 bp, Homo sapiens
aaaacatcaccttga

SEQ ID NO: 75460 - DNA, 15 bp, Homo sapiens
aaacatcaccttgaa

SEQ ID NO: 75461 - DNA, 15 bp, Homo sapiens
aacatcaccttgaaa

SEQ ID NO: 75462 - DNA, 15 bp, Homo sapiens
acatcaccttgaaag

SEQ ID NO: 75463 - DNA, 15 bp, Homo sapiens
catcaccttgaaagt

SEQ ID NO: 75464 - DNA, 15 bp, Homo sapiens
atcaccttgaaagtt

SEQ ID NO: 75465 - DNA, 15 bp, Homo sapiens
tcaccttgaaagttc

SEQ ID NO: 75466 - DNA, 15 bp, Homo sapiens
caccttgaaagttct

SEQ ID NO: 75467 - DNA, 15 bp, Homo sapiens
accttgaaagttctg

SEQ ID NO: 75468 - DNA, 15 bp, Homo sapiens
ccttgaaagttctgc

SEQ ID NO: 75469 - DNA, 15 bp, Homo sapiens
cttgaaagttctgca

SEQ ID NO: 75470 - DNA, 15 bp, Homo sapiens
ttgaaagttctgcat

SEQ ID NO: 75471 - DNA, 15 bp, Homo sapiens
tgaaagttctgcatt

SEQ ID NO: 75472 - DNA, 15 bp, Homo sapiens
gaaagttctgcattc

SEQ ID NO: 75473 - DNA, 15 bp, Homo sapiens
aaagttctgcattca

SEQ ID NO: 75474 - DNA, 15 bp, Homo sapiens
aagttctgcattcag

SEQ ID NO: 75475 - DNA, 15 bp, Homo sapiens
agttctgcattcagc

SEQ ID NO: 75476 - DNA, 15 bp, Homo sapiens
gttctgcattcagcc

SEQ ID NO: 75477 - DNA, 15 bp, Homo sapiens
ttctgcattcagcct

SEQ ID NO: 75478 - DNA, 15 bp, Homo sapiens
tctgcattcagccta

SEQ ID NO: 75479 - DNA, 15 bp, Homo sapiens
ctgcattcagcctag

SEQ ID NO: 75480 - DNA, 15 bp, Homo sapiens
tgcattcagcctaga

SEQ ID NO: 75481 - DNA, 15 bp, Homo sapiens
gcattcagcctagaa

SEQ ID NO: 75482 - DNA, 15 bp, Homo sapiens
cattcagcctagaat

SEQ ID NO: 75483 - DNA, 15 bp, Homo sapiens
attcagcctagaatt

SEQ ID NO: 75484 - DNA, 15 bp, Homo sapiens
ttcagcctagaattc

SEQ ID NO: 75485 - DNA, 15 bp, Homo sapiens
cagcctagaattctg

SEQ ID NO: 75486 - DNA, 15 bp, Homo sapiens
agcctagaattctgt

SEQ ID NO: 75487 - DNA, 15 bp, Homo sapiens
gcctagaattctgta

SEQ ID NO: 75488 - DNA, 15 bp, Homo sapiens
cctagaattctgtat

SEQ ID NO: 75489 - DNA, 15 bp, Homo sapiens
ctagaattctgtatc

SEQ ID NO: 75490 - DNA, 15 bp, Homo sapiens
tagaattctgtatcc

SEQ ID NO: 75491 - DNA, 15 bp, Homo sapiens
agaattctgtatcca

SEQ ID NO: 75492 - DNA, 15 bp, Homo sapiens
gaattctgtatccag

SEQ ID NO: 75493 - DNA, 15 bp, Homo sapiens
aattctgtatccagt

SEQ ID NO: 75494 - DNA, 15 bp, Homo sapiens
attctgtatccagtt

SEQ ID NO: 75495 - DNA, 15 bp, Homo sapiens
ttctgtatccagtta

SEQ ID NO: 75496 - DNA, 15 bp, Homo sapiens
tctgtatccagttaa

SEQ ID NO: 75497 - DNA, 15 bp, Homo sapiens
ctgtatccagttaaa

SEQ ID NO: 75498 - DNA, 15 bp, Homo sapiens
tgtatccagttaaac

SEQ ID NO: 75499 - DNA, 15 bp, Homo sapiens
gtatccagttaaacc

SEQ ID NO: 75500 - DNA, 15 bp, Homo sapiens
tatccagttaaacca

SEQ ID NO: 75501 - DNA, 15 bp, Homo sapiens
atccagttaaaccat

SEQ ID NO: 75502 - DNA, 15 bp, Homo sapiens
tccagttaaaccatc

SEQ ID NO: 75503 - DNA, 15 bp, Homo sapiens
ccagttaaaccatca

SEQ ID NO: 75504 - DNA, 15 bp, Homo sapiens
cagttaaaccatcaa

SEQ ID NO: 75505 - DNA, 15 bp, Homo sapiens
agttaaaccatcaat

SEQ ID NO: 75506 - DNA, 15 bp, Homo sapiens
gttaaaccatcaatc

SEQ ID NO: 75507 - DNA, 15 bp, Homo sapiens
ttaaaccatcaatca

SEQ ID NO: 75508 - DNA, 15 bp, Homo sapiens
taaaccatcaatcaa

SEQ ID NO: 75509 - DNA, 15 bp, Homo sapiens
aaaccatcaatcaag

SEQ ID NO: 75510 - DNA, 15 bp, Homo sapiens
aaccatcaatcaagt

SEQ ID NO: 75511 - DNA, 15 bp, Homo sapiens
accatcaatcaagtg

SEQ ID NO: 75512 - DNA, 15 bp, Homo sapiens
ccatcaatcaagtgt

SEQ ID NO: 75513 - DNA, 15 bp, Homo sapiens
catcaatcaagtgtg

SEQ ID NO: 75514 - DNA, 15 bp, Homo sapiens
atcaatcaagtgtga

SEQ ID NO: 75515 - DNA, 15 bp, Homo sapiens
tcaatcaagtgtgaa

SEQ ID NO: 75516 - DNA, 15 bp, Homo sapiens
caatcaagtgtgaaa

SEQ ID NO: 75517 - DNA, 15 bp, Homo sapiens
aatcaagtgtgaaag

SEQ ID NO: 75518 - DNA, 15 bp, Homo sapiens
atcaagtgtgaaagt

SEQ ID NO: 75519 - DNA, 15 bp, Homo sapiens
tcaagtgtgaaagta

SEQ ID NO: 75520 - DNA, 15 bp, Homo sapiens
caagtgtgaaagtag

SEQ ID NO: 75521 - DNA, 15 bp, Homo sapiens
aagtgtgaaagtagg

SEQ ID NO: 75522 - DNA, 15 bp, Homo sapiens
agtgtgaaagtaggg

SEQ ID NO: 75523 - DNA, 15 bp, Homo sapiens
gtgtgaaagtagggg

SEQ ID NO: 75524 - DNA, 15 bp, Homo sapiens
tgtgaaagtaggggg

SEQ ID NO: 75525 - DNA, 15 bp, Homo sapiens
gtgaaagtaggggga

SEQ ID NO: 75526 - DNA, 15 bp, Homo sapiens
tgaaagtagggggaa

SEQ ID NO: 75527 - DNA, 15 bp, Homo sapiens
gaaagtagggggaaa

SEQ ID NO: 75528 - DNA, 15 bp, Homo sapiens
aaagtagggggaaaa

SEQ ID NO: 75529 - DNA, 15 bp, Homo sapiens
aagtagggggaaaaa

SEQ ID NO: 75530 - DNA, 15 bp, Homo sapiens
agtagggggaaaaac

SEQ ID NO: 75531 - DNA, 15 bp, Homo sapiens
gtagggggaaaaact

SEQ ID NO: 75532 - DNA, 15 bp, Homo sapiens
tagggggaaaaactc

SEQ ID NO: 75533 - DNA, 15 bp, Homo sapiens
agggggaaaaactca

SEQ ID NO: 75534 - DNA, 15 bp, Homo sapiens
gggggaaaaactcaa

SEQ ID NO: 75535 - DNA, 15 bp, Homo sapiens
ggggaaaaactcaag

SEQ ID NO: 75536 - DNA, 15 bp, Homo sapiens
gggaaaaactcaagg

SEQ ID NO: 75537 - DNA, 15 bp, Homo sapiens
ggaaaaactcaagga

SEQ ID NO: 75538 - DNA, 15 bp, Homo sapiens
gaaaaactcaaggac

SEQ ID NO: 75539 - DNA, 15 bp, Homo sapiens
aaaaactcaaggact

SEQ ID NO: 75540 - DNA, 15 bp, Homo sapiens
aaaactcaaggacta

SEQ ID NO: 75541 - DNA, 15 bp, Homo sapiens
aaactcaaggactaa

SEQ ID NO: 75542 - DNA, 15 bp, Homo sapiens
aactcaaggactaaa

SEQ ID NO: 75543 - DNA, 15 bp, Homo sapiens
actcaaggactaaaa

SEQ ID NO: 75544 - DNA, 15 bp, Homo sapiens
ctcaaggactaaaaa

SEQ ID NO: 75545 - DNA, 15 bp, Homo sapiens
tcaaggactaaaaaa

SEQ ID NO: 75546 - DNA, 15 bp, Homo sapiens
caaggactaaaaaaa

SEQ ID NO: 75547 - DNA, 15 bp, Homo sapiens
aaggactaaaaaaat

SEQ ID NO: 75548 - DNA, 15 bp, Homo sapiens
aggactaaaaaaatg

SEQ ID NO: 75549 - DNA, 15 bp, Homo sapiens
ggactaaaaaaatgt

SEQ ID NO: 75550 - DNA, 15 bp, Homo sapiens
gactaaaaaaatgtg

SEQ ID NO: 75551 - DNA, 15 bp, Homo sapiens
actaaaaaaatgtgc

SEQ ID NO: 75552 - DNA, 15 bp, Homo sapiens
ctaaaaaaatgtgct

SEQ ID NO: 75553 - DNA, 15 bp, Homo sapiens
taaaaaaatgtgctc

SEQ ID NO: 75554 - DNA, 15 bp, Homo sapiens
aaaaaaatgtgctca

SEQ ID NO: 75555 - DNA, 15 bp, Homo sapiens
aaaaaatgtgctcat

SEQ ID NO: 75556 - DNA, 15 bp, Homo sapiens
aaaaatgtgctcatg

SEQ ID NO: 75557 - DNA, 15 bp, Homo sapiens
aaaatgtgctcatga

SEQ ID NO: 75558 - DNA, 15 bp, Homo sapiens
aaatgtgctcatgaa

SEQ ID NO: 75559 - DNA, 15 bp, Homo sapiens
aatgtgctcatgaag

SEQ ID NO: 75560 - DNA, 15 bp, Homo sapiens
atgtgctcatgaaga

SEQ ID NO: 75561 - DNA, 15 bp, Homo sapiens
tgtgctcatgaagaa

SEQ ID NO: 75562 - DNA, 15 bp, Homo sapiens
gtgctcatgaagaac

SEQ ID NO: 75563 - DNA, 15 bp, Homo sapiens
tgctcatgaagaaca

SEQ ID NO: 75564 - DNA, 15 bp, Homo sapiens
gctcatgaagaacat

SEQ ID NO: 75565 - DNA, 15 bp, Homo sapiens
ctcatgaagaacatt

SEQ ID NO: 75566 - DNA, 15 bp, Homo sapiens
tcatgaagaacattt

SEQ ID NO: 75567 - DNA, 15 bp, Homo sapiens
catgaagaacatttt

SEQ ID NO: 75568 - DNA, 15 bp, Homo sapiens
atgaagaacattttt

SEQ ID NO: 75569 - DNA, 15 bp, Homo sapiens
tgaagaacatttttt

SEQ ID NO: 75570 - DNA, 15 bp, Homo sapiens
gaagaacattttttt

SEQ ID NO: 75571 - DNA, 15 bp, Homo sapiens
aagaacatttttttt

SEQ ID NO: 75572 - DNA, 15 bp, Homo sapiens
agaacattttttttg

SEQ ID NO: 75573 - DNA, 15 bp, Homo sapiens
gaacattttttttgg

SEQ ID NO: 75574 - DNA, 15 bp, Homo sapiens
aacattttttttgga

SEQ ID NO: 75575 - DNA, 15 bp, Homo sapiens
acattttttttggac

SEQ ID NO: 75576 - DNA, 15 bp, Homo sapiens
cattttttttggaca

SEQ ID NO: 75577 - DNA, 15 bp, Homo sapiens
attttttttggacat

SEQ ID NO: 75578 - DNA, 15 bp, Homo sapiens
ttttttttggacatt

SEQ ID NO: 75579 - DNA, 15 bp, Homo sapiens
tttttttggacatta

SEQ ID NO: 75580 - DNA, 15 bp, Homo sapiens
ttttttggacattac

SEQ ID NO: 75581 - DNA, 15 bp, Homo sapiens
tttttggacattacc

SEQ ID NO: 75582 - DNA, 15 bp, Homo sapiens
ttttggacattaccc

SEQ ID NO: 75583 - DNA, 15 bp, Homo sapiens
tttggacattaccca

SEQ ID NO: 75584 - DNA, 15 bp, Homo sapiens
ttggacattacccag

SEQ ID NO: 75585 - DNA, 15 bp, Homo sapiens
tggacattacccaga

SEQ ID NO: 75586 - DNA, 15 bp, Homo sapiens
ggacattacccagaa

SEQ ID NO: 75587 - DNA, 15 bp, Homo sapiens
gacattacccagaag

SEQ ID NO: 75588 - DNA, 15 bp, Homo sapiens
acattacccagaaga

SEQ ID NO: 75589 - DNA, 15 bp, Homo sapiens
cattacccagaagat

SEQ ID NO: 75590 - DNA, 15 bp, Homo sapiens
attacccagaagatg

SEQ ID NO: 75591 - DNA, 15 bp, Homo sapiens
ttacccagaagatgt

SEQ ID NO: 75592 - DNA, 15 bp, Homo sapiens
tacccagaagatgtg

SEQ ID NO: 75593 - DNA, 15 bp, Homo sapiens
acccagaagatgtgg

SEQ ID NO: 75594 - DNA, 15 bp, Homo sapiens
cccagaagatgtggt

SEQ ID NO: 75595 - DNA, 15 bp, Homo sapiens
ccagaagatgtggtt

SEQ ID NO: 75596 - DNA, 15 bp, Homo sapiens
cagaagatgtggttc

SEQ ID NO: 75597 - DNA, 15 bp, Homo sapiens
agaagatgtggttca

SEQ ID NO: 75598 - DNA, 15 bp, Homo sapiens
gaagatgtggttcaa

SEQ ID NO: 75599 - DNA, 15 bp, Homo sapiens
aagatgtggttcaac

SEQ ID NO: 75600 - DNA, 15 bp, Homo sapiens
agatgtggttcaaca

SEQ ID NO: 75601 - DNA, 15 bp, Homo sapiens
gatgtggttcaacaa

SEQ ID NO: 75602 - DNA, 15 bp, Homo sapiens
atgtggttcaacaaa

SEQ ID NO: 75603 - DNA, 15 bp, Homo sapiens
tgtggttcaacaaaa

SEQ ID NO: 75604 - DNA, 15 bp, Homo sapiens
gtggttcaacaaaac

SEQ ID NO: 75605 - DNA, 15 bp, Homo sapiens
tggttcaacaaaaca

SEQ ID NO: 75606 - DNA, 15 bp, Homo sapiens
ggttcaacaaaacaa

SEQ ID NO: 75607 - DNA, 15 bp, Homo sapiens
gttcaacaaaacaag

SEQ ID NO: 75608 - DNA, 15 bp, Homo sapiens
ttcaacaaaacaagg

SEQ ID NO: 75609 - DNA, 15 bp, Homo sapiens
tcaacaaaacaaggg

SEQ ID NO: 75610 - DNA, 15 bp, Homo sapiens
caacaaaacaaggga

SEQ ID NO: 75611 - DNA, 15 bp, Homo sapiens
aacaaaacaagggaa

SEQ ID NO: 75612 - DNA, 15 bp, Homo sapiens
acaaaacaagggaat

SEQ ID NO: 75613 - DNA, 15 bp, Homo sapiens
caaaacaagggaata

SEQ ID NO: 75614 - DNA, 15 bp, Homo sapiens
aaaacaagggaataa

SEQ ID NO: 75615 - DNA, 15 bp, Homo sapiens
aaacaagggaataaa

SEQ ID NO: 75616 - DNA, 15 bp, Homo sapiens
aacaagggaataaac

SEQ ID NO: 75617 - DNA, 15 bp, Homo sapiens
acaagggaataaacc

SEQ ID NO: 75618 - DNA, 15 bp, Homo sapiens
caagggaataaacca

SEQ ID NO: 75619 - DNA, 15 bp, Homo sapiens
aagggaataaaccaa

SEQ ID NO: 75620 - DNA, 15 bp, Homo sapiens
agggaataaaccaag

SEQ ID NO: 75621 - DNA, 15 bp, Homo sapiens
gggaataaaccaaga

SEQ ID NO: 75622 - DNA, 15 bp, Homo sapiens
ggaataaaccaagaa

SEQ ID NO: 75623 - DNA, 15 bp, Homo sapiens
gaataaaccaagaaa

SEQ ID NO: 75624 - DNA, 15 bp, Homo sapiens
aataaaccaagaaag

SEQ ID NO: 75625 - DNA, 15 bp, Homo sapiens
ataaaccaagaaagg

SEQ ID NO: 75626 - DNA, 15 bp, Homo sapiens
taaaccaagaaagga

SEQ ID NO: 75627 - DNA, 15 bp, Homo sapiens
aaaccaagaaaggaa

SEQ ID NO: 75628 - DNA, 15 bp, Homo sapiens
aaccaagaaaggaaa

SEQ ID NO: 75629 - DNA, 15 bp, Homo sapiens
accaagaaaggaaat

SEQ ID NO: 75630 - DNA, 15 bp, Homo sapiens
ccaagaaaggaaata

SEQ ID NO: 75631 - DNA, 15 bp, Homo sapiens
caagaaaggaaataa

SEQ ID NO: 75632 - DNA, 15 bp, Homo sapiens
aagaaaggaaataaa

SEQ ID NO: 75633 - DNA, 15 bp, Homo sapiens
agaaaggaaataaaa

SEQ ID NO: 75634 - DNA, 15 bp, Homo sapiens
gaaaggaaataaaag

SEQ ID NO: 75635 - DNA, 15 bp, Homo sapiens
aaaggaaataaaaga

SEQ ID NO: 75636 - DNA, 15 bp, Homo sapiens
aaggaaataaaagag

SEQ ID NO: 75637 - DNA, 15 bp, Homo sapiens
aggaaataaaagagc

SEQ ID NO: 75638 - DNA, 15 bp, Homo sapiens
ggaaataaaagagct

SEQ ID NO: 75639 - DNA, 15 bp, Homo sapiens
gaaataaaagagctt

SEQ ID NO: 75640 - DNA, 15 bp, Homo sapiens
aaataaaagagcttc

SEQ ID NO: 75641 - DNA, 15 bp, Homo sapiens
aataaaagagcttca

SEQ ID NO: 75642 - DNA, 15 bp, Homo sapiens
ataaaagagcttcag

SEQ ID NO: 75643 - DNA, 15 bp, Homo sapiens
taaaagagcttcagt

SEQ ID NO: 75644 - DNA, 15 bp, Homo sapiens
aaaagagcttcagta

SEQ ID NO: 75645 - DNA, 15 bp, Homo sapiens
aaagagcttcagtaa

SEQ ID NO: 75646 - DNA, 15 bp, Homo sapiens
aagagcttcagtaaa

SEQ ID NO: 75647 - DNA, 15 bp, Homo sapiens
agagcttcagtaaac

SEQ ID NO: 75648 - DNA, 15 bp, Homo sapiens
gagcttcagtaaaca

SEQ ID NO: 75649 - DNA, 15 bp, Homo sapiens
agcttcagtaaacag

SEQ ID NO: 75650 - DNA, 15 bp, Homo sapiens
gcttcagtaaacaga

SEQ ID NO: 75651 - DNA, 15 bp, Homo sapiens
cttcagtaaacagag

SEQ ID NO: 75652 - DNA, 15 bp, Homo sapiens
ttcagtaaacagaga

SEQ ID NO: 75653 - DNA, 15 bp, Homo sapiens
tcagtaaacagagaa

SEQ ID NO: 75654 - DNA, 15 bp, Homo sapiens
cagtaaacagagaat

SEQ ID NO: 75655 - DNA, 15 bp, Homo sapiens
agtaaacagagaatc

SEQ ID NO: 75656 - DNA, 15 bp, Homo sapiens
gtaaacagagaatcc

SEQ ID NO: 75657 - DNA, 15 bp, Homo sapiens
taaacagagaatccc

SEQ ID NO: 75658 - DNA, 15 bp, Homo sapiens
aaacagagaatccca

SEQ ID NO: 75659 - DNA, 15 bp, Homo sapiens
aacagagaatcccac

SEQ ID NO: 75660 - DNA, 15 bp, Homo sapiens
acagagaatcccact

SEQ ID NO: 75661 - DNA, 15 bp, Homo sapiens
cagagaatcccactc

SEQ ID NO: 75662 - DNA, 15 bp, Homo sapiens
agagaatcccactca

SEQ ID NO: 75663 - DNA, 15 bp, Homo sapiens
gagaatcccactcag

SEQ ID NO: 75664 - DNA, 15 bp, Homo sapiens
agaatcccactcaga

SEQ ID NO: 75665 - DNA, 15 bp, Homo sapiens
gaatcccactcagaa

SEQ ID NO: 75666 - DNA, 15 bp, Homo sapiens
aatcccactcagaag

SEQ ID NO: 75667 - DNA, 15 bp, Homo sapiens
atcccactcagaagc

SEQ ID NO: 75668 - DNA, 15 bp, Homo sapiens
tcccactcagaagca

SEQ ID NO: 75669 - DNA, 15 bp, Homo sapiens
cccactcagaagcaa

SEQ ID NO: 75670 - DNA, 15 bp, Homo sapiens
ccactcagaagcaac

SEQ ID NO: 75671 - DNA, 15 bp, Homo sapiens
cactcagaagcaaca

SEQ ID NO: 75672 - DNA, 15 bp, Homo sapiens
actcagaagcaacaa

SEQ ID NO: 75673 - DNA, 15 bp, Homo sapiens
ctcagaagcaacaaa

SEQ ID NO: 75674 - DNA, 15 bp, Homo sapiens
tcagaagcaacaaag

SEQ ID NO: 75675 - DNA, 15 bp, Homo sapiens
cagaagcaacaaaga

SEQ ID NO: 75676 - DNA, 15 bp, Homo sapiens
agaagcaacaaagaa

SEQ ID NO: 75677 - DNA, 15 bp, Homo sapiens
gaagcaacaaagaag

SEQ ID NO: 75678 - DNA, 15 bp, Homo sapiens
aagcaacaaagaaga

SEQ ID NO: 75679 - DNA, 15 bp, Homo sapiens
agcaacaaagaagaa

SEQ ID NO: 75680 - DNA, 15 bp, Homo sapiens
gcaacaaagaagaaa

SEQ ID NO: 75681 - DNA, 15 bp, Homo sapiens
caacaaagaagaaag

SEQ ID NO: 75682 - DNA, 15 bp, Homo sapiens
aacaaagaagaaagt

SEQ ID NO: 75683 - DNA, 15 bp, Homo sapiens
acaaagaagaaagtc

SEQ ID NO: 75684 - DNA, 15 bp, Homo sapiens
caaagaagaaagtcc

SEQ ID NO: 75685 - DNA, 15 bp, Homo sapiens
aaagaagaaagtccc

SEQ ID NO: 75686 - DNA, 15 bp, Homo sapiens
aagaagaaagtccca

SEQ ID NO: 75687 - DNA, 15 bp, Homo sapiens
agaagaaagtcccag

SEQ ID NO: 75688 - DNA, 15 bp, Homo sapiens
gaagaaagtcccagg

SEQ ID NO: 75689 - DNA, 15 bp, Homo sapiens
aagaaagtcccagga

SEQ ID NO: 75690 - DNA, 15 bp, Homo sapiens
agaaagtcccaggat

SEQ ID NO: 75691 - DNA, 15 bp, Homo sapiens
gaaagtcccaggatg

SEQ ID NO: 75692 - DNA, 15 bp, Homo sapiens
aaagtcccaggatga

SEQ ID NO: 75693 - DNA, 15 bp, Homo sapiens
aagtcccaggatgac

SEQ ID NO: 75694 - DNA, 15 bp, Homo sapiens
agtcccaggatgaca

SEQ ID NO: 75695 - DNA, 15 bp, Homo sapiens
gtcccaggatgacag

SEQ ID NO: 75696 - DNA, 15 bp, Homo sapiens
tcccaggatgacagc

SEQ ID NO: 75697 - DNA, 15 bp, Homo sapiens
cccaggatgacagct

SEQ ID NO: 75698 - DNA, 15 bp, Homo sapiens
ccaggatgacagctg

SEQ ID NO: 75699 - DNA, 15 bp, Homo sapiens
caggatgacagctgt

SEQ ID NO: 75700 - DNA, 15 bp, Homo sapiens
aggatgacagctgtg

SEQ ID NO: 75701 - DNA, 15 bp, Homo sapiens
ggatgacagctgtga

SEQ ID NO: 75702 - DNA, 15 bp, Homo sapiens
gatgacagctgtgac

SEQ ID NO: 75703 - DNA, 15 bp, Homo sapiens
atgacagctgtgaca

SEQ ID NO: 75704 - DNA, 15 bp, Homo sapiens
tgacagctgtgacac

SEQ ID NO: 75705 - DNA, 15 bp, Homo sapiens
gacagctgtgacaca

SEQ ID NO: 75706 - DNA, 15 bp, Homo sapiens
acagctgtgacacaa

SEQ ID NO: 75707 - DNA, 15 bp, Homo sapiens
cagctgtgacacaag

SEQ ID NO: 75708 - DNA, 15 bp, Homo sapiens
agctgtgacacaagc

SEQ ID NO: 75709 - DNA, 15 bp, Homo sapiens
gctgtgacacaagct

SEQ ID NO: 75710 - DNA, 15 bp, Homo sapiens
ctgtgacacaagctg

SEQ ID NO: 75711 - DNA, 15 bp, Homo sapiens
tgtgacacaagctga

SEQ ID NO: 75712 - DNA, 15 bp, Homo sapiens
gtgacacaagctgaa

SEQ ID NO: 75713 - DNA, 15 bp, Homo sapiens
tgacacaagctgaaa

SEQ ID NO: 75714 - DNA, 15 bp, Homo sapiens
gacacaagctgaaaa

SEQ ID NO: 75715 - DNA, 15 bp, Homo sapiens
acacaagctgaaaag

SEQ ID NO: 75716 - DNA, 15 bp, Homo sapiens
cacaagctgaaaagt

SEQ ID NO: 75717 - DNA, 15 bp, Homo sapiens
acaagctgaaaagtt

SEQ ID NO: 75718 - DNA, 15 bp, Homo sapiens
caagctgaaaagtta

SEQ ID NO: 75719 - DNA, 15 bp, Homo sapiens
aagctgaaaagttac

SEQ ID NO: 75720 - DNA, 15 bp, Homo sapiens
agctgaaaagttacc

SEQ ID NO: 75721 - DNA, 15 bp, Homo sapiens
gctgaaaagttacca

SEQ ID NO: 75722 - DNA, 15 bp, Homo sapiens
ctgaaaagttaccag

SEQ ID NO: 75723 - DNA, 15 bp, Homo sapiens
tgaaaagttaccagt

SEQ ID NO: 75724 - DNA, 15 bp, Homo sapiens
gaaaagttaccagtt

SEQ ID NO: 75725 - DNA, 15 bp, Homo sapiens
aaaagttaccagttt

SEQ ID NO: 75726 - DNA, 15 bp, Homo sapiens
aaagttaccagtttt

SEQ ID NO: 75727 - DNA, 15 bp, Homo sapiens
aagttaccagttttg

SEQ ID NO: 75728 - DNA, 15 bp, Homo sapiens
agttaccagttttgc

SEQ ID NO: 75729 - DNA, 15 bp, Homo sapiens
gttaccagttttgct

SEQ ID NO: 75730 - DNA, 15 bp, Homo sapiens
ttaccagttttgctt

SEQ ID NO: 75731 - DNA, 15 bp, Homo sapiens
taccagttttgcttg

SEQ ID NO: 75732 - DNA, 15 bp, Homo sapiens
accagttttgcttgg

SEQ ID NO: 75733 - DNA, 15 bp, Homo sapiens
ccagttttgcttgga

SEQ ID NO: 75734 - DNA, 15 bp, Homo sapiens
cagttttgcttggag

SEQ ID NO: 75735 - DNA, 15 bp, Homo sapiens
agttttgcttggagc

SEQ ID NO: 75736 - DNA, 15 bp, Homo sapiens
gttttgcttggagca

SEQ ID NO: 75737 - DNA, 15 bp, Homo sapiens
ttttgcttggagcag

SEQ ID NO: 75738 - DNA, 15 bp, Homo sapiens
tttgcttggagcagg

SEQ ID NO: 75739 - DNA, 15 bp, Homo sapiens
ttgcttggagcagga

SEQ ID NO: 75740 - DNA, 15 bp, Homo sapiens
tgcttggagcaggag

SEQ ID NO: 75741 - DNA, 15 bp, Homo sapiens
gcttggagcaggaga

SEQ ID NO: 75742 - DNA, 15 bp, Homo sapiens
cttggagcaggagat

SEQ ID NO: 75743 - DNA, 15 bp, Homo sapiens
ttggagcaggagatt

SEQ ID NO: 75744 - DNA, 15 bp, Homo sapiens
tggagcaggagatta

SEQ ID NO: 75745 - DNA, 15 bp, Homo sapiens
ggagcaggagattag

SEQ ID NO: 75746 - DNA, 15 bp, Homo sapiens
gagcaggagattaga

SEQ ID NO: 75747 - DNA, 15 bp, Homo sapiens
agcaggagattagaa

SEQ ID NO: 75748 - DNA, 15 bp, Homo sapiens
gcaggagattagaac

SEQ ID NO: 75749 - DNA, 15 bp, Homo sapiens
caggagattagaact

SEQ ID NO: 75750 - DNA, 15 bp, Homo sapiens
aggagattagaactt

SEQ ID NO: 75751 - DNA, 15 bp, Homo sapiens
ggagattagaacttc

SEQ ID NO: 75752 - DNA, 15 bp, Homo sapiens
gagattagaacttcc

SEQ ID NO: 75753 - DNA, 15 bp, Homo sapiens
agattagaacttccg

SEQ ID NO: 75754 - DNA, 15 bp, Homo sapiens
gattagaacttccgg

SEQ ID NO: 75755 - DNA, 15 bp, Homo sapiens
attagaacttccggg

SEQ ID NO: 75756 - DNA, 15 bp, Homo sapiens
ttagaacttccggga

SEQ ID NO: 75757 - DNA, 15 bp, Homo sapiens
tagaacttccgggaa

SEQ ID NO: 75758 - DNA, 15 bp, Homo sapiens
agaacttccgggaaa

SEQ ID NO: 75759 - DNA, 15 bp, Homo sapiens
gaacttccgggaaaa

SEQ ID NO: 75760 - DNA, 15 bp, Homo sapiens
aacttccgggaaaat

SEQ ID NO: 75761 - DNA, 15 bp, Homo sapiens
acttccgggaaaata

SEQ ID NO: 75762 - DNA, 15 bp, Homo sapiens
cttccgggaaaataa

SEQ ID NO: 75763 - DNA, 15 bp, Homo sapiens
ttccgggaaaataat

SEQ ID NO: 75764 - DNA, 15 bp, Homo sapiens
tccgggaaaataatc

SEQ ID NO: 75765 - DNA, 15 bp, Homo sapiens
ccgggaaaataatca

SEQ ID NO: 75766 - DNA, 15 bp, Homo sapiens
cgggaaaataatcaa

SEQ ID NO: 75767 - DNA, 15 bp, Homo sapiens
gggaaaataatcaaa

SEQ ID NO: 75768 - DNA, 15 bp, Homo sapiens
ggaaaataatcaaat

SEQ ID NO: 75769 - DNA, 15 bp, Homo sapiens
gaaaataatcaaatt

SEQ ID NO: 75770 - DNA, 15 bp, Homo sapiens
aaaataatcaaattg

SEQ ID NO: 75771 - DNA, 15 bp, Homo sapiens
aaataatcaaattga

SEQ ID NO: 75772 - DNA, 15 bp, Homo sapiens
aataatcaaattgat

SEQ ID NO: 75773 - DNA, 15 bp, Homo sapiens
ataatcaaattgata

SEQ ID NO: 75774 - DNA, 15 bp, Homo sapiens
taatcaaattgatag

SEQ ID NO: 75775 - DNA, 15 bp, Homo sapiens
aatcaaattgataga

SEQ ID NO: 75776 - DNA, 15 bp, Homo sapiens
atcaaattgatagat

SEQ ID NO: 75777 - DNA, 15 bp, Homo sapiens
tcaaattgatagatg

SEQ ID NO: 75778 - DNA, 15 bp, Homo sapiens
caaattgatagatgg

SEQ ID NO: 75779 - DNA, 15 bp, Homo sapiens
aaattgatagatgga

SEQ ID NO: 75780 - DNA, 15 bp, Homo sapiens
aattgatagatggat

SEQ ID NO: 75781 - DNA, 15 bp, Homo sapiens
attgatagatggatg

SEQ ID NO: 75782 - DNA, 15 bp, Homo sapiens
ttgatagatggatgt

SEQ ID NO: 75783 - DNA, 15 bp, Homo sapiens
tgatagatggatgtt

SEQ ID NO: 75784 - DNA, 15 bp, Homo sapiens
gatagatggatgttg

SEQ ID NO: 75785 - DNA, 15 bp, Homo sapiens
atagatggatgttga

SEQ ID NO: 75786 - DNA, 15 bp, Homo sapiens
tagatggatgttgaa

SEQ ID NO: 75787 - DNA, 15 bp, Homo sapiens
agatggatgttgaaa

SEQ ID NO: 75788 - DNA, 15 bp, Homo sapiens
gatggatgttgaaat

SEQ ID NO: 75789 - DNA, 15 bp, Homo sapiens
atggatgttgaaata

SEQ ID NO: 75790 - DNA, 15 bp, Homo sapiens
tggatgttgaaatat

SEQ ID NO: 75791 - DNA, 15 bp, Homo sapiens
ggatgttgaaatatt

SEQ ID NO: 75792 - DNA, 15 bp, Homo sapiens
gatgttgaaatattt

SEQ ID NO: 75793 - DNA, 15 bp, Homo sapiens
atgttgaaatatttg

SEQ ID NO: 75794 - DNA, 15 bp, Homo sapiens
tgttgaaatatttgg

SEQ ID NO: 75795 - DNA, 15 bp, Homo sapiens
gttgaaatatttgga

SEQ ID NO: 75796 - DNA, 15 bp, Homo sapiens
ttgaaatatttggag

SEQ ID NO: 75797 - DNA, 15 bp, Homo sapiens
tgaaatatttggaga

SEQ ID NO: 75798 - DNA, 15 bp, Homo sapiens
gaaatatttggagaa

SEQ ID NO: 75799 - DNA, 15 bp, Homo sapiens
aaatatttggagaaa

SEQ ID NO: 75800 - DNA, 15 bp, Homo sapiens
aatatttggagaaaa

SEQ ID NO: 75801 - DNA, 15 bp, Homo sapiens
atatttggagaaaaa

SEQ ID NO: 75802 - DNA, 15 bp, Homo sapiens
tatttggagaaaaat

SEQ ID NO: 75803 - DNA, 15 bp, Homo sapiens
atttggagaaaaatg

SEQ ID NO: 75804 - DNA, 15 bp, Homo sapiens
tttggagaaaaatgt

SEQ ID NO: 75805 - DNA, 15 bp, Homo sapiens
ttggagaaaaatgta

SEQ ID NO: 75806 - DNA, 15 bp, Homo sapiens
tggagaaaaatgtaa

SEQ ID NO: 75807 - DNA, 15 bp, Homo sapiens
ggagaaaaatgtaat

SEQ ID NO: 75808 - DNA, 15 bp, Homo sapiens
gagaaaaatgtaatg

SEQ ID NO: 75809 - DNA, 15 bp, Homo sapiens
agaaaaatgtaatgg

SEQ ID NO: 75810 - DNA, 15 bp, Homo sapiens
gaaaaatgtaatgga

SEQ ID NO: 75811 - DNA, 15 bp, Homo sapiens
aaaaatgtaatggat

SEQ ID NO: 75812 - DNA, 15 bp, Homo sapiens
aaaatgtaatggatt

SEQ ID NO: 75813 - DNA, 15 bp, Homo sapiens
aaatgtaatggattc

SEQ ID NO: 75814 - DNA, 15 bp, Homo sapiens
aatgtaatggattct

SEQ ID NO: 75815 - DNA, 15 bp, Homo sapiens
atgtaatggattctt

SEQ ID NO: 75816 - DNA, 15 bp, Homo sapiens
tgtaatggattcttg

SEQ ID NO: 75817 - DNA, 15 bp, Homo sapiens
gtaatggattcttgc

SEQ ID NO: 75818 - DNA, 15 bp, Homo sapiens
taatggattcttgca

SEQ ID NO: 75819 - DNA, 15 bp, Homo sapiens
aatggattcttgcaa

SEQ ID NO: 75820 - DNA, 15 bp, Homo sapiens
atggattcttgcaaa

SEQ ID NO: 75821 - DNA, 15 bp, Homo sapiens
tggattcttgcaaaa

SEQ ID NO: 75822 - DNA, 15 bp, Homo sapiens
ggattcttgcaaaac

SEQ ID NO: 75823 - DNA, 15 bp, Homo sapiens
gattcttgcaaaact

SEQ ID NO: 75824 - DNA, 15 bp, Homo sapiens
attcttgcaaaactg

SEQ ID NO: 75825 - DNA, 15 bp, Homo sapiens
ttcttgcaaaactga

SEQ ID NO: 75826 - DNA, 15 bp, Homo sapiens
tcttgcaaaactgag

SEQ ID NO: 75827 - DNA, 15 bp, Homo sapiens
cttgcaaaactgagc

SEQ ID NO: 75828 - DNA, 15 bp, Homo sapiens
ttgcaaaactgagca

SEQ ID NO: 75829 - DNA, 15 bp, Homo sapiens
tgcaaaactgagcaa

SEQ ID NO: 75830 - DNA, 15 bp, Homo sapiens
gcaaaactgagcaaa

SEQ ID NO: 75831 - DNA, 15 bp, Homo sapiens
caaaactgagcaaat

SEQ ID NO: 75832 - DNA, 15 bp, Homo sapiens
aaaactgagcaaatt

SEQ ID NO: 75833 - DNA, 15 bp, Homo sapiens
aaactgagcaaatta

SEQ ID NO: 75834 - DNA, 15 bp, Homo sapiens
aactgagcaaattag

SEQ ID NO: 75835 - DNA, 15 bp, Homo sapiens
actgagcaaattaga

SEQ ID NO: 75836 - DNA, 15 bp, Homo sapiens
ctgagcaaattagaa

SEQ ID NO: 75837 - DNA, 15 bp, Homo sapiens
tgagcaaattagaaa

SEQ ID NO: 75838 - DNA, 15 bp, Homo sapiens
gagcaaattagaaaa

SEQ ID NO: 75839 - DNA, 15 bp, Homo sapiens
agcaaattagaaaaa

SEQ ID NO: 75840 - DNA, 15 bp, Homo sapiens
gcaaattagaaaaag

SEQ ID NO: 75841 - DNA, 15 bp, Homo sapiens
caaattagaaaaagg

SEQ ID NO: 75842 - DNA, 15 bp, Homo sapiens
aaattagaaaaagga

SEQ ID NO: 75843 - DNA, 15 bp, Homo sapiens
aattagaaaaaggaa

SEQ ID NO: 75844 - DNA, 15 bp, Homo sapiens
attagaaaaaggaaa

SEQ ID NO: 75845 - DNA, 15 bp, Homo sapiens
ttagaaaaaggaaac

SEQ ID NO: 75846 - DNA, 15 bp, Homo sapiens
tagaaaaaggaaaca

SEQ ID NO: 75847 - DNA, 15 bp, Homo sapiens
agaaaaaggaaacaa

SEQ ID NO: 75848 - DNA, 15 bp, Homo sapiens
gaaaaaggaaacaat

SEQ ID NO: 75849 - DNA, 15 bp, Homo sapiens
aaaaaggaaacaatt

SEQ ID NO: 75850 - DNA, 15 bp, Homo sapiens
aaaaggaaacaatta

SEQ ID NO: 75851 - DNA, 15 bp, Homo sapiens
aaaggaaacaattat

SEQ ID NO: 75852 - DNA, 15 bp, Homo sapiens
aaggaaacaattatt

SEQ ID NO: 75853 - DNA, 15 bp, Homo sapiens
aggaaacaattatta

SEQ ID NO: 75854 - DNA, 15 bp, Homo sapiens
ggaaacaattattag

SEQ ID NO: 75855 - DNA, 15 bp, Homo sapiens
gaaacaattattagc

SEQ ID NO: 75856 - DNA, 15 bp, Homo sapiens
aaacaattattagca

SEQ ID NO: 75857 - DNA, 15 bp, Homo sapiens
aacaattattagcat

SEQ ID NO: 75858 - DNA, 15 bp, Homo sapiens
acaattattagcatt

SEQ ID NO: 75859 - DNA, 15 bp, Homo sapiens
caattattagcattg

SEQ ID NO: 75860 - DNA, 15 bp, Homo sapiens
aattattagcattgg

SEQ ID NO: 75861 - DNA, 15 bp, Homo sapiens
attattagcattggt

SEQ ID NO: 75862 - DNA, 15 bp, Homo sapiens
ttattagcattggtg

SEQ ID NO: 75863 - DNA, 15 bp, Homo sapiens
tattagcattggtgg

SEQ ID NO: 75864 - DNA, 15 bp, Homo sapiens
attagcattggtggt

SEQ ID NO: 75865 - DNA, 15 bp, Homo sapiens
ttagcattggtggtt

SEQ ID NO: 75866 - DNA, 15 bp, Homo sapiens
tagcattggtggttt

SEQ ID NO: 75867 - DNA, 15 bp, Homo sapiens
agcattggtggtttg

SEQ ID NO: 75868 - DNA, 15 bp, Homo sapiens
gcattggtggtttga

SEQ ID NO: 75869 - DNA, 15 bp, Homo sapiens
cattggtggtttgag

SEQ ID NO: 75870 - DNA, 15 bp, Homo sapiens
attggtggtttgagt

SEQ ID NO: 75871 - DNA, 15 bp, Homo sapiens
ttggtggtttgagtt

SEQ ID NO: 75872 - DNA, 15 bp, Homo sapiens
tggtggtttgagtta

SEQ ID NO: 75873 - DNA, 15 bp, Homo sapiens
ggtggtttgagttaa

SEQ ID NO: 75874 - DNA, 15 bp, Homo sapiens
gtggtttgagttaac

SEQ ID NO: 75875 - DNA, 15 bp, Homo sapiens
tggtttgagttaacc

SEQ ID NO: 75876 - DNA, 15 bp, Homo sapiens
ggtttgagttaaccc

SEQ ID NO: 75877 - DNA, 15 bp, Homo sapiens
gtttgagttaaccca

SEQ ID NO: 75878 - DNA, 15 bp, Homo sapiens
tttgagttaacccaa

SEQ ID NO: 75879 - DNA, 15 bp, Homo sapiens
ttgagttaacccaaa

SEQ ID NO: 75880 - DNA, 15 bp, Homo sapiens
tgagttaacccaaaa

SEQ ID NO: 75881 - DNA, 15 bp, Homo sapiens
gagttaacccaaaat

SEQ ID NO: 75882 - DNA, 15 bp, Homo sapiens
agttaacccaaaatt

SEQ ID NO: 75883 - DNA, 15 bp, Homo sapiens
gttaacccaaaattg

SEQ ID NO: 75884 - DNA, 15 bp, Homo sapiens
ttaacccaaaattgt

SEQ ID NO: 75885 - DNA, 15 bp, Homo sapiens
taacccaaaattgtg

SEQ ID NO: 75886 - DNA, 15 bp, Homo sapiens
aacccaaaattgtga

SEQ ID NO: 75887 - DNA, 15 bp, Homo sapiens
acccaaaattgtgat

SEQ ID NO: 75888 - DNA, 15 bp, Homo sapiens
cccaaaattgtgatg

SEQ ID NO: 75889 - DNA, 15 bp, Homo sapiens
ccaaaattgtgatgt

SEQ ID NO: 75890 - DNA, 15 bp, Homo sapiens
caaaattgtgatgtt

SEQ ID NO: 75891 - DNA, 15 bp, Homo sapiens
aaaattgtgatgttg

SEQ ID NO: 75892 - DNA, 15 bp, Homo sapiens
aaattgtgatgttgc

SEQ ID NO: 75893 - DNA, 15 bp, Homo sapiens
aattgtgatgttgct

SEQ ID NO: 75894 - DNA, 15 bp, Homo sapiens
attgtgatgttgcta

SEQ ID NO: 75895 - DNA, 15 bp, Homo sapiens
ttgtgatgttgctat

SEQ ID NO: 75896 - DNA, 15 bp, Homo sapiens
tgtgatgttgctatt

SEQ ID NO: 75897 - DNA, 15 bp, Homo sapiens
gtgatgttgctattt

SEQ ID NO: 75898 - DNA, 15 bp, Homo sapiens
tgatgttgctatttt

SEQ ID NO: 75899 - DNA, 15 bp, Homo sapiens
gatgttgctatttta

SEQ ID NO: 75900 - DNA, 15 bp, Homo sapiens
atgttgctattttag

SEQ ID NO: 75901 - DNA, 15 bp, Homo sapiens
tgttgctattttagg

SEQ ID NO: 75902 - DNA, 15 bp, Homo sapiens
gttgctattttaggg

SEQ ID NO: 75903 - DNA, 15 bp, Homo sapiens
ttgctattttagggg

SEQ ID NO: 75904 - DNA, 15 bp, Homo sapiens
tgctattttagggga

SEQ ID NO: 75905 - DNA, 15 bp, Homo sapiens
gctattttaggggaa

SEQ ID NO: 75906 - DNA, 15 bp, Homo sapiens
ctattttaggggaat

SEQ ID NO: 75907 - DNA, 15 bp, Homo sapiens
tattttaggggaatt

SEQ ID NO: 75908 - DNA, 15 bp, Homo sapiens
attttaggggaatta

SEQ ID NO: 75909 - DNA, 15 bp, Homo sapiens
ttttaggggaattaa

SEQ ID NO: 75910 - DNA, 15 bp, Homo sapiens
tttaggggaattaag

SEQ ID NO: 75911 - DNA, 15 bp, Homo sapiens
ttaggggaattaaga

SEQ ID NO: 75912 - DNA, 15 bp, Homo sapiens
taggggaattaagat

SEQ ID NO: 75913 - DNA, 15 bp, Homo sapiens
aggggaattaagata

SEQ ID NO: 75914 - DNA, 15 bp, Homo sapiens
ggggaattaagataa

SEQ ID NO: 75915 - DNA, 15 bp, Homo sapiens
gggaattaagataag

SEQ ID NO: 75916 - DNA, 15 bp, Homo sapiens
ggaattaagataagt

SEQ ID NO: 75917 - DNA, 15 bp, Homo sapiens
gaattaagataagtg

SEQ ID NO: 75918 - DNA, 15 bp, Homo sapiens
aattaagataagtga

SEQ ID NO: 75919 - DNA, 15 bp, Homo sapiens
attaagataagtgaa

SEQ ID NO: 75920 - DNA, 15 bp, Homo sapiens
ttaagataagtgaaa

SEQ ID NO: 75921 - DNA, 15 bp, Homo sapiens
taagataagtgaaac

SEQ ID NO: 75922 - DNA, 15 bp, Homo sapiens
aagataagtgaaaca

SEQ ID NO: 75923 - DNA, 15 bp, Homo sapiens
agataagtgaaacac

SEQ ID NO: 75924 - DNA, 15 bp, Homo sapiens
gataagtgaaacacg

SEQ ID NO: 75925 - DNA, 15 bp, Homo sapiens
ataagtgaaacacgt

SEQ ID NO: 75926 - DNA, 15 bp, Homo sapiens
taagtgaaacacgta

SEQ ID NO: 75927 - DNA, 15 bp, Homo sapiens
aagtgaaacacgtat

SEQ ID NO: 75928 - DNA, 15 bp, Homo sapiens
agtgaaacacgtatg

SEQ ID NO: 75929 - DNA, 15 bp, Homo sapiens
gtgaaacacgtatgg

SEQ ID NO: 75930 - DNA, 15 bp, Homo sapiens
tgaaacacgtatgga

SEQ ID NO: 75931 - DNA, 15 bp, Homo sapiens
gaaacacgtatggaa

SEQ ID NO: 75932 - DNA, 15 bp, Homo sapiens
aaacacgtatggaat

SEQ ID NO: 75933 - DNA, 15 bp, Homo sapiens
aacacgtatggaata

SEQ ID NO: 75934 - DNA, 15 bp, Homo sapiens
acacgtatggaatac

SEQ ID NO: 75935 - DNA, 15 bp, Homo sapiens
cacgtatggaatact

SEQ ID NO: 75936 - DNA, 15 bp, Homo sapiens
acgtatggaatactg

SEQ ID NO: 75937 - DNA, 15 bp, Homo sapiens
cgtatggaatactgc

SEQ ID NO: 75938 - DNA, 15 bp, Homo sapiens
gtatggaatactgct

SEQ ID NO: 75939 - DNA, 15 bp, Homo sapiens
tatggaatactgcta

SEQ ID NO: 75940 - DNA, 15 bp, Homo sapiens
atggaatactgctag

SEQ ID NO: 75941 - DNA, 15 bp, Homo sapiens
tggaatactgctagt

SEQ ID NO: 75942 - DNA, 15 bp, Homo sapiens
ggaatactgctagtt

SEQ ID NO: 75943 - DNA, 15 bp, Homo sapiens
gaatactgctagttt

SEQ ID NO: 75944 - DNA, 15 bp, Homo sapiens
aatactgctagtttt

SEQ ID NO: 75945 - DNA, 15 bp, Homo sapiens
atactgctagttttg

SEQ ID NO: 75946 - DNA, 15 bp, Homo sapiens
tactgctagttttgt

SEQ ID NO: 75947 - DNA, 15 bp, Homo sapiens
actgctagttttgta

SEQ ID NO: 75948 - DNA, 15 bp, Homo sapiens
ctgctagttttgtaa

SEQ ID NO: 75949 - DNA, 15 bp, Homo sapiens
tgctagttttgtaag

SEQ ID NO: 75950 - DNA, 15 bp, Homo sapiens
gctagttttgtaagt

SEQ ID NO: 75951 - DNA, 15 bp, Homo sapiens
ctagttttgtaagtc

SEQ ID NO: 75952 - DNA, 15 bp, Homo sapiens
tagttttgtaagtct

SEQ ID NO: 75953 - DNA, 15 bp, Homo sapiens
agttttgtaagtctc

SEQ ID NO: 75954 - DNA, 15 bp, Homo sapiens
gttttgtaagtctcc

SEQ ID NO: 75955 - DNA, 15 bp, Homo sapiens
ttttgtaagtctcct

SEQ ID NO: 75956 - DNA, 15 bp, Homo sapiens
tttgtaagtctcctt

SEQ ID NO: 75957 - DNA, 15 bp, Homo sapiens
ttgtaagtctccttt

SEQ ID NO: 75958 - DNA, 15 bp, Homo sapiens
tgtaagtctccttta

SEQ ID NO: 75959 - DNA, 15 bp, Homo sapiens
gtaagtctcctttac

SEQ ID NO: 75960 - DNA, 15 bp, Homo sapiens
taagtctcctttacc

SEQ ID NO: 75961 - DNA, 15 bp, Homo sapiens
aagtctcctttacca

SEQ ID NO: 75962 - DNA, 15 bp, Homo sapiens
agtctcctttaccat

SEQ ID NO: 75963 - DNA, 15 bp, Homo sapiens
gtctcctttaccatg

SEQ ID NO: 75964 - DNA, 15 bp, Homo sapiens
tctcctttaccatgg

SEQ ID NO: 75965 - DNA, 15 bp, Homo sapiens
ctcctttaccatggc

SEQ ID NO: 75966 - DNA, 15 bp, Homo sapiens
tcctttaccatggca

SEQ ID NO: 75967 - DNA, 15 bp, Homo sapiens
cctttaccatggcag

SEQ ID NO: 75968 - DNA, 15 bp, Homo sapiens
ctttaccatggcagg

SEQ ID NO: 75969 - DNA, 15 bp, Homo sapiens
tttaccatggcagga

SEQ ID NO: 75970 - DNA, 15 bp, Homo sapiens
ttaccatggcaggac

SEQ ID NO: 75971 - DNA, 15 bp, Homo sapiens
taccatggcaggaca

SEQ ID NO: 75972 - DNA, 15 bp, Homo sapiens
accatggcaggacat

SEQ ID NO: 75973 - DNA, 15 bp, Homo sapiens
ccatggcaggacatc

SEQ ID NO: 75974 - DNA, 15 bp, Homo sapiens
catggcaggacatct

SEQ ID NO: 75975 - DNA, 15 bp, Homo sapiens
atggcaggacatctg

SEQ ID NO: 75976 - DNA, 15 bp, Homo sapiens
tggcaggacatctgt

SEQ ID NO: 75977 - DNA, 15 bp, Homo sapiens
ggcaggacatctgta

SEQ ID NO: 75978 - DNA, 15 bp, Homo sapiens
gcaggacatctgtag

SEQ ID NO: 75979 - DNA, 15 bp, Homo sapiens
caggacatctgtagt

SEQ ID NO: 75980 - DNA, 15 bp, Homo sapiens
aggacatctgtagtt

SEQ ID NO: 75981 - DNA, 15 bp, Homo sapiens
ggacatctgtagtta

SEQ ID NO: 75982 - DNA, 15 bp, Homo sapiens
gacatctgtagttaa

SEQ ID NO: 75983 - DNA, 15 bp, Homo sapiens
acatctgtagttaat

SEQ ID NO: 75984 - DNA, 15 bp, Homo sapiens
catctgtagttaata

SEQ ID NO: 75985 - DNA, 15 bp, Homo sapiens
atctgtagttaataa

SEQ ID NO: 75986 - DNA, 15 bp, Homo sapiens
tctgtagttaataaa

SEQ ID NO: 75987 - DNA, 15 bp, Homo sapiens
ctgtagttaataaat

SEQ ID NO: 75988 - DNA, 15 bp, Homo sapiens
tgtagttaataaatc

SEQ ID NO: 75989 - DNA, 15 bp, Homo sapiens
gtagttaataaatct

SEQ ID NO: 75990 - DNA, 15 bp, Homo sapiens
tagttaataaatctg

SEQ ID NO: 75991 - DNA, 15 bp, Homo sapiens
agttaataaatctgt

SEQ ID NO: 75992 - DNA, 15 bp, Homo sapiens
gttaataaatctgta

SEQ ID NO: 75993 - DNA, 15 bp, Homo sapiens
ttaataaatctgtaa

SEQ ID NO: 75994 - DNA, 15 bp, Homo sapiens
taataaatctgtaag

SEQ ID NO: 75995 - DNA, 15 bp, Homo sapiens
aataaatctgtaaga

SEQ ID NO: 75996 - DNA, 15 bp, Homo sapiens
ataaatctgtaagaa

SEQ ID NO: 75997 - DNA, 15 bp, Homo sapiens
taaatctgtaagaag

SEQ ID NO: 75998 - DNA, 15 bp, Homo sapiens
aaatctgtaagaagc

SEQ ID NO: 75999 - DNA, 15 bp, Homo sapiens
aatctgtaagaagca

SEQ ID NO: 76000 - DNA, 15 bp, Homo sapiens
atctgtaagaagcag

SEQ ID NO: 76001 - DNA, 15 bp, Homo sapiens
tctgtaagaagcagt

SEQ ID NO: 76002 - DNA, 15 bp, Homo sapiens
ctgtaagaagcagta

SEQ ID NO: 76003 - DNA, 15 bp, Homo sapiens
tgtaagaagcagtat

SEQ ID NO: 76004 - DNA, 15 bp, Homo sapiens
gtaagaagcagtatt

SEQ ID NO: 76005 - DNA, 15 bp, Homo sapiens
taagaagcagtatta

SEQ ID NO: 76006 - DNA, 15 bp, Homo sapiens
aagaagcagtattaa

SEQ ID NO: 76007 - DNA, 15 bp, Homo sapiens
agaagcagtattaag

SEQ ID NO: 76008 - DNA, 15 bp, Homo sapiens
gaagcagtattaaga

SEQ ID NO: 76009 - DNA, 15 bp, Homo sapiens
aagcagtattaagaa

SEQ ID NO: 76010 - DNA, 15 bp, Homo sapiens
agcagtattaagaat

SEQ ID NO: 76011 - DNA, 15 bp, Homo sapiens
gcagtattaagaata

SEQ ID NO: 76012 - DNA, 15 bp, Homo sapiens
cagtattaagaataa

SEQ ID NO: 76013 - DNA, 15 bp, Homo sapiens
agtattaagaataat

SEQ ID NO: 76014 - DNA, 15 bp, Homo sapiens
gtattaagaataata

SEQ ID NO: 76015 - DNA, 15 bp, Homo sapiens
tattaagaataatat

SEQ ID NO: 76016 - DNA, 15 bp, Homo sapiens
attaagaataatatt

SEQ ID NO: 76017 - DNA, 15 bp, Homo sapiens
ttaagaataatattt

SEQ ID NO: 76018 - DNA, 15 bp, Homo sapiens
taagaataatatttt

SEQ ID NO: 76019 - DNA, 15 bp, Homo sapiens
aagaataatatttta

SEQ ID NO: 76020 - DNA, 15 bp, Homo sapiens
agaataatattttaa

SEQ ID NO: 76021 - DNA, 15 bp, Homo sapiens
gaataatattttaaa

SEQ ID NO: 76022 - DNA, 15 bp, Homo sapiens
aataatattttaaaa

SEQ ID NO: 76023 - DNA, 15 bp, Homo sapiens
ataatattttaaaat

SEQ ID NO: 76024 - DNA, 15 bp, Homo sapiens
taatattttaaaata

SEQ ID NO: 76025 - DNA, 15 bp, Homo sapiens
aatattttaaaatac

SEQ ID NO: 76026 - DNA, 15 bp, Homo sapiens
atattttaaaatacc

SEQ ID NO: 76027 - DNA, 15 bp, Homo sapiens
tattttaaaatacct

SEQ ID NO: 76028 - DNA, 15 bp, Homo sapiens
attttaaaataccta

SEQ ID NO: 76029 - DNA, 15 bp, Homo sapiens
ttttaaaatacctaa

SEQ ID NO: 76030 - DNA, 15 bp, Homo sapiens
tttaaaatacctaat

SEQ ID NO: 76031 - DNA, 15 bp, Homo sapiens
ttaaaatacctaatt

SEQ ID NO: 76032 - DNA, 15 bp, Homo sapiens
taaaatacctaatta

SEQ ID NO: 76033 - DNA, 15 bp, Homo sapiens
aaaatacctaattaa

SEQ ID NO: 76034 - DNA, 15 bp, Homo sapiens
aaatacctaattaaa

SEQ ID NO: 76035 - DNA, 15 bp, Homo sapiens
aatacctaattaaat

SEQ ID NO: 76036 - DNA, 15 bp, Homo sapiens
atacctaattaaata

SEQ ID NO: 76037 - DNA, 15 bp, Homo sapiens
tacctaattaaatag

SEQ ID NO: 76038 - DNA, 15 bp, Homo sapiens
acctaattaaatagg

SEQ ID NO: 76039 - DNA, 15 bp, Homo sapiens
cctaattaaatagga

SEQ ID NO: 76040 - DNA, 15 bp, Homo sapiens
ctaattaaataggag

SEQ ID NO: 76041 - DNA, 15 bp, Homo sapiens
taattaaataggagg

SEQ ID NO: 76042 - DNA, 15 bp, Homo sapiens
aattaaataggagga

SEQ ID NO: 76043 - DNA, 15 bp, Homo sapiens
attaaataggaggaa

SEQ ID NO: 76044 - DNA, 15 bp, Homo sapiens
ttaaataggaggaaa

SEQ ID NO: 76045 - DNA, 15 bp, Homo sapiens
taaataggaggaaaa

SEQ ID NO: 76046 - DNA, 15 bp, Homo sapiens
aaataggaggaaaaa

SEQ ID NO: 76047 - DNA, 15 bp, Homo sapiens
aataggaggaaaaag

SEQ ID NO: 76048 - DNA, 15 bp, Homo sapiens
ataggaggaaaaaga

SEQ ID NO: 76049 - DNA, 15 bp, Homo sapiens
taggaggaaaaagaa

SEQ ID NO: 76050 - DNA, 15 bp, Homo sapiens
aggaggaaaaagaat

SEQ ID NO: 76051 - DNA, 15 bp, Homo sapiens
ggaggaaaaagaatc

SEQ ID NO: 76052 - DNA, 15 bp, Homo sapiens
gaggaaaaagaatcc

SEQ ID NO: 76053 - DNA, 15 bp, Homo sapiens
aggaaaaagaatccg

SEQ ID NO: 76054 - DNA, 15 bp, Homo sapiens
ggaaaaagaatccga

SEQ ID NO: 76055 - DNA, 15 bp, Homo sapiens
gaaaaagaatccgag

SEQ ID NO: 76056 - DNA, 15 bp, Homo sapiens
aaaaagaatccgagt

SEQ ID NO: 76057 - DNA, 15 bp, Homo sapiens
aaaagaatccgagta

SEQ ID NO: 76058 - DNA, 15 bp, Homo sapiens
aaagaatccgagtag

SEQ ID NO: 76059 - DNA, 15 bp, Homo sapiens
aagaatccgagtagt

SEQ ID NO: 76060 - DNA, 15 bp, Homo sapiens
agaatccgagtagtt

SEQ ID NO: 76061 - DNA, 15 bp, Homo sapiens
gaatccgagtagttg

SEQ ID NO: 76062 - DNA, 15 bp, Homo sapiens
aatccgagtagttga

SEQ ID NO: 76063 - DNA, 15 bp, Homo sapiens
atccgagtagttgag

SEQ ID NO: 76064 - DNA, 15 bp, Homo sapiens
tccgagtagttgagg

SEQ ID NO: 76065 - DNA, 15 bp, Homo sapiens
ccgagtagttgaggg

SEQ ID NO: 76066 - DNA, 15 bp, Homo sapiens
cgagtagttgagggt

SEQ ID NO: 76067 - DNA, 15 bp, Homo sapiens
gagtagttgagggtg

SEQ ID NO: 76068 - DNA, 15 bp, Homo sapiens
agtagttgagggtga

SEQ ID NO: 76069 - DNA, 15 bp, Homo sapiens
gtagttgagggtgat

SEQ ID NO: 76070 - DNA, 15 bp, Homo sapiens
tagttgagggtgatt

SEQ ID NO: 76071 - DNA, 15 bp, Homo sapiens
agttgagggtgattg

SEQ ID NO: 76072 - DNA, 15 bp, Homo sapiens
gttgagggtgattgc

SEQ ID NO: 76073 - DNA, 15 bp, Homo sapiens
ttgagggtgattgca

SEQ ID NO: 76074 - DNA, 15 bp, Homo sapiens
tgagggtgattgcat

SEQ ID NO: 76075 - DNA, 15 bp, Homo sapiens
gagggtgattgcatc

SEQ ID NO: 76076 - DNA, 15 bp, Homo sapiens
agggtgattgcatct

SEQ ID NO: 76077 - DNA, 15 bp, Homo sapiens
gggtgattgcatctg

SEQ ID NO: 76078 - DNA, 15 bp, Homo sapiens
ggtgattgcatctgg

SEQ ID NO: 76079 - DNA, 15 bp, Homo sapiens
gtgattgcatctggg

SEQ ID NO: 76080 - DNA, 15 bp, Homo sapiens
tgattgcatctgggg

SEQ ID NO: 76081 - DNA, 15 bp, Homo sapiens
gattgcatctgggga

SEQ ID NO: 76082 - DNA, 15 bp, Homo sapiens
attgcatctggggag

SEQ ID NO: 76083 - DNA, 15 bp, Homo sapiens
ttgcatctggggaga

SEQ ID NO: 76084 - DNA, 15 bp, Homo sapiens
tgcatctggggagaa

SEQ ID NO: 76085 - DNA, 15 bp, Homo sapiens
gcatctggggagaag

SEQ ID NO: 76086 - DNA, 15 bp, Homo sapiens
catctggggagaagc

SEQ ID NO: 76087 - DNA, 15 bp, Homo sapiens
atctggggagaagca

SEQ ID NO: 76088 - DNA, 15 bp, Homo sapiens
tctggggagaagcag

SEQ ID NO: 76089 - DNA, 15 bp, Homo sapiens
ctggggagaagcagg

SEQ ID NO: 76090 - DNA, 15 bp, Homo sapiens
tggggagaagcagga

SEQ ID NO: 76091 - DNA, 15 bp, Homo sapiens
ggggagaagcaggaa

SEQ ID NO: 76092 - DNA, 15 bp, Homo sapiens
gggagaagcaggaat

SEQ ID NO: 76093 - DNA, 15 bp, Homo sapiens
ggagaagcaggaata

SEQ ID NO: 76094 - DNA, 15 bp, Homo sapiens
gagaagcaggaataa

SEQ ID NO: 76095 - DNA, 15 bp, Homo sapiens
agaagcaggaataaa

SEQ ID NO: 76096 - DNA, 15 bp, Homo sapiens
gaagcaggaataaag

SEQ ID NO: 76097 - DNA, 15 bp, Homo sapiens
aagcaggaataaagg

SEQ ID NO: 76098 - DNA, 15 bp, Homo sapiens
agcaggaataaaggt

SEQ ID NO: 76099 - DNA, 15 bp, Homo sapiens
gcaggaataaaggtt

SEQ ID NO: 76100 - DNA, 15 bp, Homo sapiens
caggaataaaggttt

SEQ ID NO: 76101 - DNA, 15 bp, Homo sapiens
aggaataaaggtttg

SEQ ID NO: 76102 - DNA, 15 bp, Homo sapiens
ggaataaaggtttga

SEQ ID NO: 76103 - DNA, 15 bp, Homo sapiens
gaataaaggtttgaa

SEQ ID NO: 76104 - DNA, 15 bp, Homo sapiens
aataaaggtttgaag

SEQ ID NO: 76105 - DNA, 15 bp, Homo sapiens
ataaaggtttgaaga

SEQ ID NO: 76106 - DNA, 15 bp, Homo sapiens
taaaggtttgaagat

SEQ ID NO: 76107 - DNA, 15 bp, Homo sapiens
aaaggtttgaagata

SEQ ID NO: 76108 - DNA, 15 bp, Homo sapiens
aaggtttgaagataa

SEQ ID NO: 76109 - DNA, 15 bp, Homo sapiens
aggtttgaagataaa

SEQ ID NO: 76110 - DNA, 15 bp, Homo sapiens
ggtttgaagataaat

SEQ ID NO: 76111 - DNA, 15 bp, Homo sapiens
gtttgaagataaata

SEQ ID NO: 76112 - DNA, 15 bp, Homo sapiens
tttgaagataaatag

SEQ ID NO: 76113 - DNA, 15 bp, Homo sapiens
ttgaagataaatagg

SEQ ID NO: 76114 - DNA, 15 bp, Homo sapiens
tgaagataaataggg

SEQ ID NO: 76115 - DNA, 15 bp, Homo sapiens
gaagataaatagggc

SEQ ID NO: 76116 - DNA, 15 bp, Homo sapiens
aagataaatagggcc

SEQ ID NO: 76117 - DNA, 15 bp, Homo sapiens
agataaatagggcca

SEQ ID NO: 76118 - DNA, 15 bp, Homo sapiens
gataaatagggccag

SEQ ID NO: 76119 - DNA, 15 bp, Homo sapiens
ataaatagggccaga

SEQ ID NO: 76120 - DNA, 15 bp, Homo sapiens
taaatagggccagag

SEQ ID NO: 76121 - DNA, 15 bp, Homo sapiens
aaatagggccagaga

SEQ ID NO: 76122 - DNA, 15 bp, Homo sapiens
aatagggccagagat

SEQ ID NO: 76123 - DNA, 15 bp, Homo sapiens
atagggccagagatg

SEQ ID NO: 76124 - DNA, 15 bp, Homo sapiens
tagggccagagatga

SEQ ID NO: 76125 - DNA, 15 bp, Homo sapiens
agggccagagatgag

SEQ ID NO: 76126 - DNA, 15 bp, Homo sapiens
gggccagagatgagt

SEQ ID NO: 76127 - DNA, 15 bp, Homo sapiens
ggccagagatgagta

SEQ ID NO: 76128 - DNA, 15 bp, Homo sapiens
gccagagatgagtaa

SEQ ID NO: 76129 - DNA, 15 bp, Homo sapiens
ccagagatgagtaat

SEQ ID NO: 76130 - DNA, 15 bp, Homo sapiens
cagagatgagtaatt

SEQ ID NO: 76131 - DNA, 15 bp, Homo sapiens
agagatgagtaattt

SEQ ID NO: 76132 - DNA, 15 bp, Homo sapiens
gagatgagtaatttt

SEQ ID NO: 76133 - DNA, 15 bp, Homo sapiens
agatgagtaattttg

SEQ ID NO: 76134 - DNA, 15 bp, Homo sapiens
gatgagtaattttgt

SEQ ID NO: 76135 - DNA, 15 bp, Homo sapiens
atgagtaattttgtt

SEQ ID NO: 76136 - DNA, 15 bp, Homo sapiens
tgagtaattttgtta

SEQ ID NO: 76137 - DNA, 15 bp, Homo sapiens
gagtaattttgttac

SEQ ID NO: 76138 - DNA, 15 bp, Homo sapiens
agtaattttgttact

SEQ ID NO: 76139 - DNA, 15 bp, Homo sapiens
gtaattttgttactg

SEQ ID NO: 76140 - DNA, 15 bp, Homo sapiens
taattttgttactgt

SEQ ID NO: 76141 - DNA, 15 bp, Homo sapiens
aattttgttactgtg

SEQ ID NO: 76142 - DNA, 15 bp, Homo sapiens
attttgttactgtga

SEQ ID NO: 76143 - DNA, 15 bp, Homo sapiens
ttttgttactgtgat

SEQ ID NO: 76144 - DNA, 15 bp, Homo sapiens
tttgttactgtgata

SEQ ID NO: 76145 - DNA, 15 bp, Homo sapiens
ttgttactgtgataa

SEQ ID NO: 76146 - DNA, 15 bp, Homo sapiens
tgttactgtgataat

SEQ ID NO: 76147 - DNA, 15 bp, Homo sapiens
gttactgtgataata

SEQ ID NO: 76148 - DNA, 15 bp, Homo sapiens
ttactgtgataatat

SEQ ID NO: 76149 - DNA, 15 bp, Homo sapiens
tactgtgataatata

SEQ ID NO: 76150 - DNA, 15 bp, Homo sapiens
actgtgataatatat

SEQ ID NO: 76151 - DNA, 15 bp, Homo sapiens
ctgtgataatatatt

SEQ ID NO: 76152 - DNA, 15 bp, Homo sapiens
tgtgataatatattt

SEQ ID NO: 76153 - DNA, 15 bp, Homo sapiens
gtgataatatatttt

SEQ ID NO: 76154 - DNA, 15 bp, Homo sapiens
tgataatatatttta

SEQ ID NO: 76155 - DNA, 15 bp, Homo sapiens
gataatatattttat

SEQ ID NO: 76156 - DNA, 15 bp, Homo sapiens
ataatatattttata

SEQ ID NO: 76157 - DNA, 15 bp, Homo sapiens
taatatattttatat

SEQ ID NO: 76158 - DNA, 15 bp, Homo sapiens
aatatattttatata

SEQ ID NO: 76159 - DNA, 15 bp, Homo sapiens
atatattttatatat

SEQ ID NO: 76160 - DNA, 15 bp, Homo sapiens
tatattttatatata

SEQ ID NO: 76161 - DNA, 15 bp, Homo sapiens
atattttatatatat

SEQ ID NO: 76162 - DNA, 15 bp, Homo sapiens
tattttatatatatg

SEQ ID NO: 76163 - DNA, 15 bp, Homo sapiens
attttatatatatgt

SEQ ID NO: 76164 - DNA, 15 bp, Homo sapiens
ttttatatatatgtg

SEQ ID NO: 76165 - DNA, 15 bp, Homo sapiens
tttatatatatgtgt

SEQ ID NO: 76166 - DNA, 15 bp, Homo sapiens
ttatatatatgtgta

SEQ ID NO: 76167 - DNA, 15 bp, Homo sapiens
tatatatatgtgtat

SEQ ID NO: 76168 - DNA, 15 bp, Homo sapiens
atatatatgtgtatg

SEQ ID NO: 76169 - DNA, 15 bp, Homo sapiens
tatatatgtgtatgt

SEQ ID NO: 76170 - DNA, 15 bp, Homo sapiens
atatatgtgtatgtg

SEQ ID NO: 76171 - DNA, 15 bp, Homo sapiens
tatatgtgtatgtgt

SEQ ID NO: 76172 - DNA, 15 bp, Homo sapiens
atgtgtatgtgtgtg

SEQ ID NO: 76173 - DNA, 15 bp, Homo sapiens
tgtgtatgtgtgtgc

SEQ ID NO: 76174 - DNA, 15 bp, Homo sapiens
gtgtatgtgtgtgcg

SEQ ID NO: 76175 - DNA, 15 bp, Homo sapiens
tgtatgtgtgtgcgt

SEQ ID NO: 76176 - DNA, 15 bp, Homo sapiens
gtatgtgtgtgcgtg

SEQ ID NO: 76177 - DNA, 15 bp, Homo sapiens
tatgtgtgtgcgtgt

SEQ ID NO: 76178 - DNA, 15 bp, Homo sapiens
atgtgtgtgcgtgtg

SEQ ID NO: 76179 - DNA, 15 bp, Homo sapiens
tgtgtgtgcgtgtgt

SEQ ID NO: 76180 - DNA, 15 bp, Homo sapiens
gtgtgtgcgtgtgta

SEQ ID NO: 76181 - DNA, 15 bp, Homo sapiens
tgtgtgcgtgtgtat

SEQ ID NO: 76182 - DNA, 15 bp, Homo sapiens
gtgtgcgtgtgtata

SEQ ID NO: 76183 - DNA, 15 bp, Homo sapiens
tgtgcgtgtgtatat

SEQ ID NO: 76184 - DNA, 15 bp, Homo sapiens
gtgcgtgtgtatata

SEQ ID NO: 76185 - DNA, 15 bp, Homo sapiens
tgcgtgtgtatatat

SEQ ID NO: 76186 - DNA, 15 bp, Homo sapiens
gcgtgtgtatatata

SEQ ID NO: 76187 - DNA, 15 bp, Homo sapiens
cgtgtgtatatatat

SEQ ID NO: 76188 - DNA, 15 bp, Homo sapiens
gtgtgtatatatata

SEQ ID NO: 76189 - DNA, 15 bp, Homo sapiens
tgtgtatatatatat

SEQ ID NO: 76190 - DNA, 15 bp, Homo sapiens
gtgtatatatatata

SEQ ID NO: 76191 - DNA, 15 bp, Homo sapiens
tgtatatatatatat

SEQ ID NO: 76192 - DNA, 15 bp, Homo sapiens
gtatatatatatatg

SEQ ID NO: 76193 - DNA, 15 bp, Homo sapiens
tatatatatatatga

SEQ ID NO: 76194 - DNA, 15 bp, Homo sapiens
atatatatatatgag

SEQ ID NO: 76195 - DNA, 15 bp, Homo sapiens
tatatatatatgaga

SEQ ID NO: 76196 - DNA, 15 bp, Homo sapiens
atatatatatgagat

SEQ ID NO: 76197 - DNA, 15 bp, Homo sapiens
tatatatatgagata

SEQ ID NO: 76198 - DNA, 15 bp, Homo sapiens
atatatatgagatat

SEQ ID NO: 76199 - DNA, 15 bp, Homo sapiens
tatatatgagatata

SEQ ID NO: 76200 - DNA, 15 bp, Homo sapiens
atatatgagatatat

SEQ ID NO: 76201 - DNA, 15 bp, Homo sapiens
tatatgagatatatc

SEQ ID NO: 76202 - DNA, 15 bp, Homo sapiens
atatgagatatatct

SEQ ID NO: 76203 - DNA, 15 bp, Homo sapiens
tatgagatatatctc

SEQ ID NO: 76204 - DNA, 15 bp, Homo sapiens
atgagatatatctca

SEQ ID NO: 76205 - DNA, 15 bp, Homo sapiens
tgagatatatctcat

SEQ ID NO: 76206 - DNA, 15 bp, Homo sapiens
gagatatatctcata

SEQ ID NO: 76207 - DNA, 15 bp, Homo sapiens
agatatatctcatat

SEQ ID NO: 76208 - DNA, 15 bp, Homo sapiens
gatatatctcatata

SEQ ID NO: 76209 - DNA, 15 bp, Homo sapiens
atatatctcatatat

SEQ ID NO: 76210 - DNA, 15 bp, Homo sapiens
tatatctcatatata

SEQ ID NO: 76211 - DNA, 15 bp, Homo sapiens
atatctcatatatat

SEQ ID NO: 76212 - DNA, 15 bp, Homo sapiens
tatctcatatatatg

SEQ ID NO: 76213 - DNA, 15 bp, Homo sapiens
atctcatatatatga

SEQ ID NO: 76214 - DNA, 15 bp, Homo sapiens
tctcatatatatgag

SEQ ID NO: 76215 - DNA, 15 bp, Homo sapiens
ctcatatatatgaga

SEQ ID NO: 76216 - DNA, 15 bp, Homo sapiens
tcatatatatgagat

SEQ ID NO: 76217 - DNA, 15 bp, Homo sapiens
catatatatgagata

SEQ ID NO: 76218 - DNA, 15 bp, Homo sapiens
tatatgagatatata

SEQ ID NO: 76219 - DNA, 15 bp, Homo sapiens
atatgagatatatat

SEQ ID NO: 76220 - DNA, 15 bp, Homo sapiens
tatgagatatatatg

SEQ ID NO: 76221 - DNA, 15 bp, Homo sapiens
atgagatatatatga

SEQ ID NO: 76222 - DNA, 15 bp, Homo sapiens
tgagatatatatgat

SEQ ID NO: 76223 - DNA, 15 bp, Homo sapiens
gagatatatatgata

SEQ ID NO: 76224 - DNA, 15 bp, Homo sapiens
agatatatatgatat

SEQ ID NO: 76225 - DNA, 15 bp, Homo sapiens
gatatatatgatata

SEQ ID NO: 76226 - DNA, 15 bp, Homo sapiens
atatatatgatatat

SEQ ID NO: 76227 - DNA, 15 bp, Homo sapiens
tatatatgatatata

SEQ ID NO: 76228 - DNA, 15 bp, Homo sapiens
atatatgatatatat

SEQ ID NO: 76229 - DNA, 15 bp, Homo sapiens
tatatgatatatata

SEQ ID NO: 76230 - DNA, 15 bp, Homo sapiens
atatgatatatatat

SEQ ID NO: 76231 - DNA, 15 bp, Homo sapiens
tatgatatatatatg

SEQ ID NO: 76232 - DNA, 15 bp, Homo sapiens
atgatatatatatga

SEQ ID NO: 76233 - DNA, 15 bp, Homo sapiens
tgatatatatatgat

SEQ ID NO: 76234 - DNA, 15 bp, Homo sapiens
gatatatatatgata

SEQ ID NO: 76235 - DNA, 15 bp, Homo sapiens
atatatatatgatat

SEQ ID NO: 76236 - DNA, 15 bp, Homo sapiens
tatatatatgatata

SEQ ID NO: 76237 - DNA, 15 bp, Homo sapiens
tatatgatatatatg

SEQ ID NO: 76238 - DNA, 15 bp, Homo sapiens
atatgatatatatga

SEQ ID NO: 76239 - DNA, 15 bp, Homo sapiens
tatgatatatatgat

SEQ ID NO: 76240 - DNA, 15 bp, Homo sapiens
atgatatatatgata

SEQ ID NO: 76241 - DNA, 15 bp, Homo sapiens
tgatatatatgatat

SEQ ID NO: 76242 - DNA, 15 bp, Homo sapiens
tatgatatatatata

SEQ ID NO: 76243 - DNA, 15 bp, Homo sapiens
atgatatatatatat

SEQ ID NO: 76244 - DNA, 15 bp, Homo sapiens
tgatatatatatata

SEQ ID NO: 76245 - DNA, 15 bp, Homo sapiens
gatatatatatataa

SEQ ID NO: 76246 - DNA, 15 bp, Homo sapiens
atatatataaaacat

SEQ ID NO: 76247 - DNA, 15 bp, Homo sapiens
tatatataaaacata

SEQ ID NO: 76248 - DNA, 15 bp, Homo sapiens
atatataaaacatac

SEQ ID NO: 76249 - DNA, 15 bp, Homo sapiens
tatataaaacataca

SEQ ID NO: 76250 - DNA, 15 bp, Homo sapiens
atataaaacatacag

SEQ ID NO: 76251 - DNA, 15 bp, Homo sapiens
tataaaacatacagt

SEQ ID NO: 76252 - DNA, 15 bp, Homo sapiens
ataaaacatacagtt

SEQ ID NO: 76253 - DNA, 15 bp, Homo sapiens
taaaacatacagttc

SEQ ID NO: 76254 - DNA, 15 bp, Homo sapiens
aaaacatacagttca

SEQ ID NO: 76255 - DNA, 15 bp, Homo sapiens
aaacatacagttcag

SEQ ID NO: 76256 - DNA, 15 bp, Homo sapiens
aacatacagttcagt

SEQ ID NO: 76257 - DNA, 15 bp, Homo sapiens
acatacagttcagta

SEQ ID NO: 76258 - DNA, 15 bp, Homo sapiens
catacagttcagtag

SEQ ID NO: 76259 - DNA, 15 bp, Homo sapiens
atacagttcagtagc

SEQ ID NO: 76260 - DNA, 15 bp, Homo sapiens
tacagttcagtagca

SEQ ID NO: 76261 - DNA, 15 bp, Homo sapiens
acagttcagtagcat

SEQ ID NO: 76262 - DNA, 15 bp, Homo sapiens
cagttcagtagcatt

SEQ ID NO: 76263 - DNA, 15 bp, Homo sapiens
agttcagtagcatta

SEQ ID NO: 76264 - DNA, 15 bp, Homo sapiens
gttcagtagcattaa

SEQ ID NO: 76265 - DNA, 15 bp, Homo sapiens
ttcagtagcattaac

SEQ ID NO: 76266 - DNA, 15 bp, Homo sapiens
tcagtagcattaaca

SEQ ID NO: 76267 - DNA, 15 bp, Homo sapiens
cagtagcattaacat

SEQ ID NO: 76268 - DNA, 15 bp, Homo sapiens
agtagcattaacatc

SEQ ID NO: 76269 - DNA, 15 bp, Homo sapiens
gtagcattaacatct

SEQ ID NO: 76270 - DNA, 15 bp, Homo sapiens
tagcattaacatcta

SEQ ID NO: 76271 - DNA, 15 bp, Homo sapiens
agcattaacatctag

SEQ ID NO: 76272 - DNA, 15 bp, Homo sapiens
gcattaacatctagc

SEQ ID NO: 76273 - DNA, 15 bp, Homo sapiens
cattaacatctagca

SEQ ID NO: 76274 - DNA, 15 bp, Homo sapiens
attaacatctagcat

SEQ ID NO: 76275 - DNA, 15 bp, Homo sapiens
ttaacatctagcatt

SEQ ID NO: 76276 - DNA, 15 bp, Homo sapiens
taacatctagcattc

SEQ ID NO: 76277 - DNA, 15 bp, Homo sapiens
aacatctagcattca

SEQ ID NO: 76278 - DNA, 15 bp, Homo sapiens
acatctagcattcag

SEQ ID NO: 76279 - DNA, 15 bp, Homo sapiens
catctagcattcagt

SEQ ID NO: 76280 - DNA, 15 bp, Homo sapiens
atctagcattcagta

SEQ ID NO: 76281 - DNA, 15 bp, Homo sapiens
tctagcattcagtac

SEQ ID NO: 76282 - DNA, 15 bp, Homo sapiens
ctagcattcagtaca

SEQ ID NO: 76283 - DNA, 15 bp, Homo sapiens
tagcattcagtacat

SEQ ID NO: 76284 - DNA, 15 bp, Homo sapiens
agcattcagtacatt

SEQ ID NO: 76285 - DNA, 15 bp, Homo sapiens
gcattcagtacattt

SEQ ID NO: 76286 - DNA, 15 bp, Homo sapiens
cattcagtacattta

SEQ ID NO: 76287 - DNA, 15 bp, Homo sapiens
attcagtacatttac

SEQ ID NO: 76288 - DNA, 15 bp, Homo sapiens
ttcagtacatttaca

SEQ ID NO: 76289 - DNA, 15 bp, Homo sapiens
tcagtacatttacat

SEQ ID NO: 76290 - DNA, 15 bp, Homo sapiens
cagtacatttacatt

SEQ ID NO: 76291 - DNA, 15 bp, Homo sapiens
agtacatttacattg

SEQ ID NO: 76292 - DNA, 15 bp, Homo sapiens
gtacatttacattgt

SEQ ID NO: 76293 - DNA, 15 bp, Homo sapiens
tacatttacattgtt

SEQ ID NO: 76294 - DNA, 15 bp, Homo sapiens
acatttacattgttg

SEQ ID NO: 76295 - DNA, 15 bp, Homo sapiens
catttacattgttgt

SEQ ID NO: 76296 - DNA, 15 bp, Homo sapiens
atttacattgttgtg

SEQ ID NO: 76297 - DNA, 15 bp, Homo sapiens
tttacattgttgtgc

SEQ ID NO: 76298 - DNA, 15 bp, Homo sapiens
ttacattgttgtgca

SEQ ID NO: 76299 - DNA, 15 bp, Homo sapiens
tacattgttgtgcaa

SEQ ID NO: 76300 - DNA, 15 bp, Homo sapiens
acattgttgtgcaat

SEQ ID NO: 76301 - DNA, 15 bp, Homo sapiens
cattgttgtgcaatt

SEQ ID NO: 76302 - DNA, 15 bp, Homo sapiens
attgttgtgcaattg

SEQ ID NO: 76303 - DNA, 15 bp, Homo sapiens
ttgttgtgcaattgt

SEQ ID NO: 76304 - DNA, 15 bp, Homo sapiens
tgttgtgcaattgtc

SEQ ID NO: 76305 - DNA, 15 bp, Homo sapiens
gttgtgcaattgtca

SEQ ID NO: 76306 - DNA, 15 bp, Homo sapiens
ttgtgcaattgtcac

SEQ ID NO: 76307 - DNA, 15 bp, Homo sapiens
tgtgcaattgtcacc

SEQ ID NO: 76308 - DNA, 15 bp, Homo sapiens
gtgcaattgtcacca

SEQ ID NO: 76309 - DNA, 15 bp, Homo sapiens
tgcaattgtcaccac

SEQ ID NO: 76310 - DNA, 15 bp, Homo sapiens
gcaattgtcaccact

SEQ ID NO: 76311 - DNA, 15 bp, Homo sapiens
caattgtcaccactg

SEQ ID NO: 76312 - DNA, 15 bp, Homo sapiens
aattgtcaccactgt

SEQ ID NO: 76313 - DNA, 15 bp, Homo sapiens
attgtcaccactgtc

SEQ ID NO: 76314 - DNA, 15 bp, Homo sapiens
ttgtcaccactgtcc

SEQ ID NO: 76315 - DNA, 15 bp, Homo sapiens
tgtcaccactgtcca

SEQ ID NO: 76316 - DNA, 15 bp, Homo sapiens
gtcaccactgtccat

SEQ ID NO: 76317 - DNA, 15 bp, Homo sapiens
tcaccactgtccatc

SEQ ID NO: 76318 - DNA, 15 bp, Homo sapiens
caccactgtccatct

SEQ ID NO: 76319 - DNA, 15 bp, Homo sapiens
accactgtccatctc

SEQ ID NO: 76320 - DNA, 15 bp, Homo sapiens
ccactgtccatctct

SEQ ID NO: 76321 - DNA, 15 bp, Homo sapiens
cactgtccatctcta

SEQ ID NO: 76322 - DNA, 15 bp, Homo sapiens
actgtccatctctag

SEQ ID NO: 76323 - DNA, 15 bp, Homo sapiens
ctgtccatctctaga

SEQ ID NO: 76324 - DNA, 15 bp, Homo sapiens
tgtccatctctagaa

SEQ ID NO: 76325 - DNA, 15 bp, Homo sapiens
gtccatctctagaac

SEQ ID NO: 76326 - DNA, 15 bp, Homo sapiens
tccatctctagaact

SEQ ID NO: 76327 - DNA, 15 bp, Homo sapiens
ccatctctagaactt

SEQ ID NO: 76328 - DNA, 15 bp, Homo sapiens
catctctagaacttt

SEQ ID NO: 76329 - DNA, 15 bp, Homo sapiens
atctctagaactttt

SEQ ID NO: 76330 - DNA, 15 bp, Homo sapiens
tctctagaacttttt

SEQ ID NO: 76331 - DNA, 15 bp, Homo sapiens
ctctagaactttttc

SEQ ID NO: 76332 - DNA, 15 bp, Homo sapiens
tctagaactttttca

SEQ ID NO: 76333 - DNA, 15 bp, Homo sapiens
ctagaactttttcat

SEQ ID NO: 76334 - DNA, 15 bp, Homo sapiens
tagaactttttcatt

SEQ ID NO: 76335 - DNA, 15 bp, Homo sapiens
agaactttttcatta

SEQ ID NO: 76336 - DNA, 15 bp, Homo sapiens
gaactttttcattat

SEQ ID NO: 76337 - DNA, 15 bp, Homo sapiens
aactttttcattatc

SEQ ID NO: 76338 - DNA, 15 bp, Homo sapiens
actttttcattatcc

SEQ ID NO: 76339 - DNA, 15 bp, Homo sapiens
ctttttcattatccc

SEQ ID NO: 76340 - DNA, 15 bp, Homo sapiens
tttttcattatccca

SEQ ID NO: 76341 - DNA, 15 bp, Homo sapiens
ttttcattatcccac

SEQ ID NO: 76342 - DNA, 15 bp, Homo sapiens
tttcattatcccaca

SEQ ID NO: 76343 - DNA, 15 bp, Homo sapiens
ttcattatcccacac

SEQ ID NO: 76344 - DNA, 15 bp, Homo sapiens
tcattatcccacact

SEQ ID NO: 76345 - DNA, 15 bp, Homo sapiens
cattatcccacactg

SEQ ID NO: 76346 - DNA, 15 bp, Homo sapiens
attatcccacactga

SEQ ID NO: 76347 - DNA, 15 bp, Homo sapiens
ttatcccacactgac

SEQ ID NO: 76348 - DNA, 15 bp, Homo sapiens
tatcccacactgaca

SEQ ID NO: 76349 - DNA, 15 bp, Homo sapiens
atcccacactgacat

SEQ ID NO: 76350 - DNA, 15 bp, Homo sapiens
tcccacactgacata

SEQ ID NO: 76351 - DNA, 15 bp, Homo sapiens
cccacactgacatac

SEQ ID NO: 76352 - DNA, 15 bp, Homo sapiens
ccacactgacatacc

SEQ ID NO: 76353 - DNA, 15 bp, Homo sapiens
cacactgacatacca

SEQ ID NO: 76354 - DNA, 15 bp, Homo sapiens
acactgacataccac

SEQ ID NO: 76355 - DNA, 15 bp, Homo sapiens
cactgacataccaca

SEQ ID NO: 76356 - DNA, 15 bp, Homo sapiens
actgacataccacac

SEQ ID NO: 76357 - DNA, 15 bp, Homo sapiens
ctgacataccacacc

SEQ ID NO: 76358 - DNA, 15 bp, Homo sapiens
tgacataccacaccc

SEQ ID NO: 76359 - DNA, 15 bp, Homo sapiens
gacataccacaccca

SEQ ID NO: 76360 - DNA, 15 bp, Homo sapiens
acataccacacccat

SEQ ID NO: 76361 - DNA, 15 bp, Homo sapiens
cataccacacccatt

SEQ ID NO: 76362 - DNA, 15 bp, Homo sapiens
ataccacacccatta

SEQ ID NO: 76363 - DNA, 15 bp, Homo sapiens
taccacacccattaa

SEQ ID NO: 76364 - DNA, 15 bp, Homo sapiens
accacacccattaaa

SEQ ID NO: 76365 - DNA, 15 bp, Homo sapiens
ccacacccattaaat

SEQ ID NO: 76366 - DNA, 15 bp, Homo sapiens
cacacccattaaata

SEQ ID NO: 76367 - DNA, 15 bp, Homo sapiens
acacccattaaataa

SEQ ID NO: 76368 - DNA, 15 bp, Homo sapiens
cacccattaaataat

SEQ ID NO: 76369 - DNA, 15 bp, Homo sapiens
acccattaaataata

SEQ ID NO: 76370 - DNA, 15 bp, Homo sapiens
cccattaaataataa

SEQ ID NO: 76371 - DNA, 15 bp, Homo sapiens
ccattaaataataac

SEQ ID NO: 76372 - DNA, 15 bp, Homo sapiens
cattaaataataact

SEQ ID NO: 76373 - DNA, 15 bp, Homo sapiens
attaaataataactc

SEQ ID NO: 76374 - DNA, 15 bp, Homo sapiens
ttaaataataactcc

SEQ ID NO: 76375 - DNA, 15 bp, Homo sapiens
taaataataactcct

SEQ ID NO: 76376 - DNA, 15 bp, Homo sapiens
aaataataactcctc

SEQ ID NO: 76377 - DNA, 15 bp, Homo sapiens
aataataactcctca

SEQ ID NO: 76378 - DNA, 15 bp, Homo sapiens
ataataactcctcat

SEQ ID NO: 76379 - DNA, 15 bp, Homo sapiens
taataactcctcatt

SEQ ID NO: 76380 - DNA, 15 bp, Homo sapiens
aataactcctcattg

SEQ ID NO: 76381 - DNA, 15 bp, Homo sapiens
ataactcctcattgc

SEQ ID NO: 76382 - DNA, 15 bp, Homo sapiens
taactcctcattgct

SEQ ID NO: 76383 - DNA, 15 bp, Homo sapiens
aactcctcattgctc

SEQ ID NO: 76384 - DNA, 15 bp, Homo sapiens
actcctcattgctcc

SEQ ID NO: 76385 - DNA, 15 bp, Homo sapiens
ctcctcattgctcct

SEQ ID NO: 76386 - DNA, 15 bp, Homo sapiens
tcctcattgctcctc

SEQ ID NO: 76387 - DNA, 15 bp, Homo sapiens
cctcattgctcctcc

SEQ ID NO: 76388 - DNA, 15 bp, Homo sapiens
ctcattgctcctcct

SEQ ID NO: 76389 - DNA, 15 bp, Homo sapiens
tcattgctcctcctg

SEQ ID NO: 76390 - DNA, 15 bp, Homo sapiens
cattgctcctcctgt

SEQ ID NO: 76391 - DNA, 15 bp, Homo sapiens
attgctcctcctgtt

SEQ ID NO: 76392 - DNA, 15 bp, Homo sapiens
ttgctcctcctgtta

SEQ ID NO: 76393 - DNA, 15 bp, Homo sapiens
tgctcctcctgttag

SEQ ID NO: 76394 - DNA, 15 bp, Homo sapiens
gctcctcctgttagt

SEQ ID NO: 76395 - DNA, 15 bp, Homo sapiens
ctcctcctgttagta

SEQ ID NO: 76396 - DNA, 15 bp, Homo sapiens
tcctcctgttagtac

SEQ ID NO: 76397 - DNA, 15 bp, Homo sapiens
cctcctgttagtacc

SEQ ID NO: 76398 - DNA, 15 bp, Homo sapiens
ctcctgttagtacca

SEQ ID NO: 76399 - DNA, 15 bp, Homo sapiens
tcctgttagtaccaa

SEQ ID NO: 76400 - DNA, 15 bp, Homo sapiens
cctgttagtaccaac

SEQ ID NO: 76401 - DNA, 15 bp, Homo sapiens
ctgttagtaccaacc

SEQ ID NO: 76402 - DNA, 15 bp, Homo sapiens
tgttagtaccaacca

SEQ ID NO: 76403 - DNA, 15 bp, Homo sapiens
gttagtaccaaccat

SEQ ID NO: 76404 - DNA, 15 bp, Homo sapiens
ttagtaccaaccatt

SEQ ID NO: 76405 - DNA, 15 bp, Homo sapiens
tagtaccaaccattg

SEQ ID NO: 76406 - DNA, 15 bp, Homo sapiens
agtaccaaccattgt

SEQ ID NO: 76407 - DNA, 15 bp, Homo sapiens
gtaccaaccattgtt

SEQ ID NO: 76408 - DNA, 15 bp, Homo sapiens
taccaaccattgttc

SEQ ID NO: 76409 - DNA, 15 bp, Homo sapiens
accaaccattgttct

SEQ ID NO: 76410 - DNA, 15 bp, Homo sapiens
ccaaccattgttcta

SEQ ID NO: 76411 - DNA, 15 bp, Homo sapiens
caaccattgttctac

SEQ ID NO: 76412 - DNA, 15 bp, Homo sapiens
aaccattgttctact

SEQ ID NO: 76413 - DNA, 15 bp, Homo sapiens
accattgttctactt

SEQ ID NO: 76414 - DNA, 15 bp, Homo sapiens
ccattgttctacttt

SEQ ID NO: 76415 - DNA, 15 bp, Homo sapiens
cattgttctactttc

SEQ ID NO: 76416 - DNA, 15 bp, Homo sapiens
attgttctactttca

SEQ ID NO: 76417 - DNA, 15 bp, Homo sapiens
ttgttctactttcat

SEQ ID NO: 76418 - DNA, 15 bp, Homo sapiens
tgttctactttcatc

SEQ ID NO: 76419 - DNA, 15 bp, Homo sapiens
gttctactttcatct

SEQ ID NO: 76420 - DNA, 15 bp, Homo sapiens
ttctactttcatctc

SEQ ID NO: 76421 - DNA, 15 bp, Homo sapiens
tctactttcatctct

SEQ ID NO: 76422 - DNA, 15 bp, Homo sapiens
ctactttcatctcta

SEQ ID NO: 76423 - DNA, 15 bp, Homo sapiens
tactttcatctctat

SEQ ID NO: 76424 - DNA, 15 bp, Homo sapiens
actttcatctctatg

SEQ ID NO: 76425 - DNA, 15 bp, Homo sapiens
ctttcatctctatgt

SEQ ID NO: 76426 - DNA, 15 bp, Homo sapiens
tttcatctctatgta

SEQ ID NO: 76427 - DNA, 15 bp, Homo sapiens
ttcatctctatgtat

SEQ ID NO: 76428 - DNA, 15 bp, Homo sapiens
tcatctctatgtatt

SEQ ID NO: 76429 - DNA, 15 bp, Homo sapiens
catctctatgtattt

SEQ ID NO: 76430 - DNA, 15 bp, Homo sapiens
atctctatgtatttg

SEQ ID NO: 76431 - DNA, 15 bp, Homo sapiens
tctctatgtatttga

SEQ ID NO: 76432 - DNA, 15 bp, Homo sapiens
ctctatgtatttgac

SEQ ID NO: 76433 - DNA, 15 bp, Homo sapiens
tctatgtatttgact

SEQ ID NO: 76434 - DNA, 15 bp, Homo sapiens
ctatgtatttgacta

SEQ ID NO: 76435 - DNA, 15 bp, Homo sapiens
tatgtatttgactat

SEQ ID NO: 76436 - DNA, 15 bp, Homo sapiens
atgtatttgactatt

SEQ ID NO: 76437 - DNA, 15 bp, Homo sapiens
tgtatttgactattc

SEQ ID NO: 76438 - DNA, 15 bp, Homo sapiens
gtatttgactattct

SEQ ID NO: 76439 - DNA, 15 bp, Homo sapiens
tatttgactattcta

SEQ ID NO: 76440 - DNA, 15 bp, Homo sapiens
atttgactattctag

SEQ ID NO: 76441 - DNA, 15 bp, Homo sapiens
tttgactattctagg

SEQ ID NO: 76442 - DNA, 15 bp, Homo sapiens
ttgactattctaggt

SEQ ID NO: 76443 - DNA, 15 bp, Homo sapiens
tgactattctaggta

SEQ ID NO: 76444 - DNA, 15 bp, Homo sapiens
gactattctaggtac

SEQ ID NO: 76445 - DNA, 15 bp, Homo sapiens
actattctaggtacc

SEQ ID NO: 76446 - DNA, 15 bp, Homo sapiens
ctattctaggtacct

SEQ ID NO: 76447 - DNA, 15 bp, Homo sapiens
tattctaggtacctc

SEQ ID NO: 76448 - DNA, 15 bp, Homo sapiens
attctaggtacctcg

SEQ ID NO: 76449 - DNA, 15 bp, Homo sapiens
ttctaggtacctcgt

SEQ ID NO: 76450 - DNA, 15 bp, Homo sapiens
tctaggtacctcgta

SEQ ID NO: 76451 - DNA, 15 bp, Homo sapiens
ctaggtacctcgtat

SEQ ID NO: 76452 - DNA, 15 bp, Homo sapiens
taggtacctcgtata

SEQ ID NO: 76453 - DNA, 15 bp, Homo sapiens
aggtacctcgtataa

SEQ ID NO: 76454 - DNA, 15 bp, Homo sapiens
ggtacctcgtataag

SEQ ID NO: 76455 - DNA, 15 bp, Homo sapiens
gtacctcgtataagc

SEQ ID NO: 76456 - DNA, 15 bp, Homo sapiens
tacctcgtataagcg

SEQ ID NO: 76457 - DNA, 15 bp, Homo sapiens
acctcgtataagcgg

SEQ ID NO: 76458 - DNA, 15 bp, Homo sapiens
cctcgtataagcgga

SEQ ID NO: 76459 - DNA, 15 bp, Homo sapiens
ctcgtataagcggaa

SEQ ID NO: 76460 - DNA, 15 bp, Homo sapiens
tcgtataagcggaat

SEQ ID NO: 76461 - DNA, 15 bp, Homo sapiens
cgtataagcggaatc

SEQ ID NO: 76462 - DNA, 15 bp, Homo sapiens
gtataagcggaatca

SEQ ID NO: 76463 - DNA, 15 bp, Homo sapiens
tataagcggaatcac

SEQ ID NO: 76464 - DNA, 15 bp, Homo sapiens
ataagcggaatcacg

SEQ ID NO: 76465 - DNA, 15 bp, Homo sapiens
taagcggaatcacgt

SEQ ID NO: 76466 - DNA, 15 bp, Homo sapiens
aagcggaatcacgtg

SEQ ID NO: 76467 - DNA, 15 bp, Homo sapiens
agcggaatcacgtga

SEQ ID NO: 76468 - DNA, 15 bp, Homo sapiens
gcggaatcacgtgat

SEQ ID NO: 76469 - DNA, 15 bp, Homo sapiens
cggaatcacgtgata

SEQ ID NO: 76470 - DNA, 15 bp, Homo sapiens
ggaatcacgtgatat

SEQ ID NO: 76471 - DNA, 15 bp, Homo sapiens
gaatcacgtgatatc

SEQ ID NO: 76472 - DNA, 15 bp, Homo sapiens
aatcacgtgatatct

SEQ ID NO: 76473 - DNA, 15 bp, Homo sapiens
atcacgtgatatctt

SEQ ID NO: 76474 - DNA, 15 bp, Homo sapiens
tcacgtgatatcttt

SEQ ID NO: 76475 - DNA, 15 bp, Homo sapiens
cacgtgatatctttt

SEQ ID NO: 76476 - DNA, 15 bp, Homo sapiens
acgtgatatcttttt

SEQ ID NO: 76477 - DNA, 15 bp, Homo sapiens
cgtgatatctttttg

SEQ ID NO: 76478 - DNA, 15 bp, Homo sapiens
gtgatatctttttgt

SEQ ID NO: 76479 - DNA, 15 bp, Homo sapiens
tgatatctttttgta

SEQ ID NO: 76480 - DNA, 15 bp, Homo sapiens
gatatctttttgtaa

SEQ ID NO: 76481 - DNA, 15 bp, Homo sapiens
atatctttttgtaac

SEQ ID NO: 76482 - DNA, 15 bp, Homo sapiens
tatctttttgtaact

SEQ ID NO: 76483 - DNA, 15 bp, Homo sapiens
atctttttgtaactg

SEQ ID NO: 76484 - DNA, 15 bp, Homo sapiens
tatttaagaattatc

SEQ ID NO: 76485 - DNA, 15 bp, Homo sapiens
atttaagaattatct

SEQ ID NO: 76486 - DNA, 15 bp, Homo sapiens
tttaagaattatctt

SEQ ID NO: 76487 - DNA, 15 bp, Homo sapiens
ttaagaattatcttt

SEQ ID NO: 76488 - DNA, 15 bp, Homo sapiens
taagaattatcttta

SEQ ID NO: 76489 - DNA, 15 bp, Homo sapiens
aagaattatctttaa

SEQ ID NO: 76490 - DNA, 15 bp, Homo sapiens
agaattatctttaaa

SEQ ID NO: 76491 - DNA, 15 bp, Homo sapiens
gaattatctttaaaa

SEQ ID NO: 76492 - DNA, 15 bp, Homo sapiens
aattatctttaaaaa

SEQ ID NO: 76493 - DNA, 15 bp, Homo sapiens
attatctttaaaaat

SEQ ID NO: 76494 - DNA, 15 bp, Homo sapiens
ttatctttaaaaatt

SEQ ID NO: 76495 - DNA, 15 bp, Homo sapiens
tatctttaaaaattt

SEQ ID NO: 76496 - DNA, 15 bp, Homo sapiens
atctttaaaaatttc

SEQ ID NO: 76497 - DNA, 15 bp, Homo sapiens
tctttaaaaatttca

SEQ ID NO: 76498 - DNA, 15 bp, Homo sapiens
ctttaaaaatttcaa

SEQ ID NO: 76499 - DNA, 15 bp, Homo sapiens
tttaaaaatttcaaa

SEQ ID NO: 76500 - DNA, 15 bp, Homo sapiens
ttaaaaatttcaaaa

SEQ ID NO: 76501 - DNA, 15 bp, Homo sapiens
taaaaatttcaaaaa

SEQ ID NO: 76502 - DNA, 15 bp, Homo sapiens
aaaaatttcaaaaat

SEQ ID NO: 76503 - DNA, 15 bp, Homo sapiens
aaaatttcaaaaatt

SEQ ID NO: 76504 - DNA, 15 bp, Homo sapiens
aaatttcaaaaattt

SEQ ID NO: 76505 - DNA, 15 bp, Homo sapiens
aatttcaaaaatttt

SEQ ID NO: 76506 - DNA, 15 bp, Homo sapiens
atttcaaaaatttta

SEQ ID NO: 76507 - DNA, 15 bp, Homo sapiens
tttcaaaaattttaa

SEQ ID NO: 76508 - DNA, 15 bp, Homo sapiens
ttcaaaaattttaat

SEQ ID NO: 76509 - DNA, 15 bp, Homo sapiens
tcaaaaattttaatt

SEQ ID NO: 76510 - DNA, 15 bp, Homo sapiens
caaaaattttaattt

SEQ ID NO: 76511 - DNA, 15 bp, Homo sapiens
aaaaattttaatttt

SEQ ID NO: 76512 - DNA, 15 bp, Homo sapiens
aaaattttaatttta

SEQ ID NO: 76513 - DNA, 15 bp, Homo sapiens
aaattttaattttac

SEQ ID NO: 76514 - DNA, 15 bp, Homo sapiens
aattttaattttact

SEQ ID NO: 76515 - DNA, 15 bp, Homo sapiens
attttaattttactg

SEQ ID NO: 76516 - DNA, 15 bp, Homo sapiens
ttttaattttactgt

SEQ ID NO: 76517 - DNA, 15 bp, Homo sapiens
tttaattttactgtt

SEQ ID NO: 76518 - DNA, 15 bp, Homo sapiens
ttaattttactgttg

SEQ ID NO: 76519 - DNA, 15 bp, Homo sapiens
taattttactgttgt

SEQ ID NO: 76520 - DNA, 15 bp, Homo sapiens
aattttactgttgtg

SEQ ID NO: 76521 - DNA, 15 bp, Homo sapiens
attttactgttgtgt

SEQ ID NO: 76522 - DNA, 15 bp, Homo sapiens
ttttactgttgtgtt

SEQ ID NO: 76523 - DNA, 15 bp, Homo sapiens
tttactgttgtgttt

SEQ ID NO: 76524 - DNA, 15 bp, Homo sapiens
ttactgttgtgtttt

SEQ ID NO: 76525 - DNA, 15 bp, Homo sapiens
tactgttgtgtttta

SEQ ID NO: 76526 - DNA, 15 bp, Homo sapiens
actgttgtgttttag

SEQ ID NO: 76527 - DNA, 15 bp, Homo sapiens
ctgttgtgttttagg

SEQ ID NO: 76528 - DNA, 15 bp, Homo sapiens
tgttgtgttttagga

SEQ ID NO: 76529 - DNA, 15 bp, Homo sapiens
gttgtgttttaggaa

SEQ ID NO: 76530 - DNA, 15 bp, Homo sapiens
ttgtgttttaggaaa

SEQ ID NO: 76531 - DNA, 15 bp, Homo sapiens
tgtgttttaggaaaa

SEQ ID NO: 76532 - DNA, 15 bp, Homo sapiens
gtgttttaggaaaaa

SEQ ID NO: 76533 - DNA, 15 bp, Homo sapiens
tgttttaggaaaaag

SEQ ID NO: 76534 - DNA, 15 bp, Homo sapiens
gttttaggaaaaagt

SEQ ID NO: 76535 - DNA, 15 bp, Homo sapiens
ttttaggaaaaagta

SEQ ID NO: 76536 - DNA, 15 bp, Homo sapiens
tttaggaaaaagtat

SEQ ID NO: 76537 - DNA, 15 bp, Homo sapiens
ttaggaaaaagtatt

SEQ ID NO: 76538 - DNA, 15 bp, Homo sapiens
taggaaaaagtattg

SEQ ID NO: 76539 - DNA, 15 bp, Homo sapiens
aggaaaaagtattgc

SEQ ID NO: 76540 - DNA, 15 bp, Homo sapiens
ggaaaaagtattgca

SEQ ID NO: 76541 - DNA, 15 bp, Homo sapiens
gaaaaagtattgcat

SEQ ID NO: 76542 - DNA, 15 bp, Homo sapiens
aaaaagtattgcata

SEQ ID NO: 76543 - DNA, 15 bp, Homo sapiens
aaaagtattgcataa

SEQ ID NO: 76544 - DNA, 15 bp, Homo sapiens
aaagtattgcataaa

SEQ ID NO: 76545 - DNA, 15 bp, Homo sapiens
aagtattgcataaag

SEQ ID NO: 76546 - DNA, 15 bp, Homo sapiens
agtattgcataaagc

SEQ ID NO: 76547 - DNA, 15 bp, Homo sapiens
gtattgcataaagct

SEQ ID NO: 76548 - DNA, 15 bp, Homo sapiens
tattgcataaagcta

SEQ ID NO: 76549 - DNA, 15 bp, Homo sapiens
attgcataaagctat

SEQ ID NO: 76550 - DNA, 15 bp, Homo sapiens
ttgcataaagctatt

SEQ ID NO: 76551 - DNA, 15 bp, Homo sapiens
tgcataaagctatta

SEQ ID NO: 76552 - DNA, 15 bp, Homo sapiens
gcataaagctattaa

SEQ ID NO: 76553 - DNA, 15 bp, Homo sapiens
cataaagctattaat

SEQ ID NO: 76554 - DNA, 15 bp, Homo sapiens
ataaagctattaata

SEQ ID NO: 76555 - DNA, 15 bp, Homo sapiens
taaagctattaatat

SEQ ID NO: 76556 - DNA, 15 bp, Homo sapiens
aaagctattaatatt

SEQ ID NO: 76557 - DNA, 15 bp, Homo sapiens
aagctattaatattg

SEQ ID NO: 76558 - DNA, 15 bp, Homo sapiens
agctattaatattgt

SEQ ID NO: 76559 - DNA, 15 bp, Homo sapiens
gctattaatattgtc

SEQ ID NO: 76560 - DNA, 15 bp, Homo sapiens
ctattaatattgtca

SEQ ID NO: 76561 - DNA, 15 bp, Homo sapiens
tattaatattgtcag

SEQ ID NO: 76562 - DNA, 15 bp, Homo sapiens
attaatattgtcagg

SEQ ID NO: 76563 - DNA, 15 bp, Homo sapiens
ttaatattgtcagga

SEQ ID NO: 76564 - DNA, 15 bp, Homo sapiens
taatattgtcaggaa

SEQ ID NO: 76565 - DNA, 15 bp, Homo sapiens
aatattgtcaggaag

SEQ ID NO: 76566 - DNA, 15 bp, Homo sapiens
atattgtcaggaaga

SEQ ID NO: 76567 - DNA, 15 bp, Homo sapiens
tattgtcaggaagac

SEQ ID NO: 76568 - DNA, 15 bp, Homo sapiens
attgtcaggaagact

SEQ ID NO: 76569 - DNA, 15 bp, Homo sapiens
ttgtcaggaagacta

SEQ ID NO: 76570 - DNA, 15 bp, Homo sapiens
tgtcaggaagactaa

SEQ ID NO: 76571 - DNA, 15 bp, Homo sapiens
gtcaggaagactaaa

SEQ ID NO: 76572 - DNA, 15 bp, Homo sapiens
tcaggaagactaaag

SEQ ID NO: 76573 - DNA, 15 bp, Homo sapiens
caggaagactaaagt

SEQ ID NO: 76574 - DNA, 15 bp, Homo sapiens
aggaagactaaagtg

SEQ ID NO: 76575 - DNA, 15 bp, Homo sapiens
ggaagactaaagtgc

SEQ ID NO: 76576 - DNA, 15 bp, Homo sapiens
gaagactaaagtgca

SEQ ID NO: 76577 - DNA, 15 bp, Homo sapiens
aagactaaagtgcag

SEQ ID NO: 76578 - DNA, 15 bp, Homo sapiens
agactaaagtgcagc

SEQ ID NO: 76579 - DNA, 15 bp, Homo sapiens
gactaaagtgcagca

SEQ ID NO: 76580 - DNA, 15 bp, Homo sapiens
actaaagtgcagcat

SEQ ID NO: 76581 - DNA, 15 bp, Homo sapiens
ctaaagtgcagcata

SEQ ID NO: 76582 - DNA, 15 bp, Homo sapiens
taaagtgcagcatag

SEQ ID NO: 76583 - DNA, 15 bp, Homo sapiens
aaagtgcagcataga

SEQ ID NO: 76584 - DNA, 15 bp, Homo sapiens
aagtgcagcatagac

SEQ ID NO: 76585 - DNA, 15 bp, Homo sapiens
agtgcagcatagact

SEQ ID NO: 76586 - DNA, 15 bp, Homo sapiens
gtgcagcatagacta

SEQ ID NO: 76587 - DNA, 15 bp, Homo sapiens
tgcagcatagactaa

SEQ ID NO: 76588 - DNA, 15 bp, Homo sapiens
gcagcatagactaag

SEQ ID NO: 76589 - DNA, 15 bp, Homo sapiens
cagcatagactaaga

SEQ ID NO: 76590 - DNA, 15 bp, Homo sapiens
agcatagactaagaa

SEQ ID NO: 76591 - DNA, 15 bp, Homo sapiens
gcatagactaagaat

SEQ ID NO: 76592 - DNA, 15 bp, Homo sapiens
catagactaagaatt

SEQ ID NO: 76593 - DNA, 15 bp, Homo sapiens
atagactaagaatta

SEQ ID NO: 76594 - DNA, 15 bp, Homo sapiens
tagactaagaattag

SEQ ID NO: 76595 - DNA, 15 bp, Homo sapiens
agactaagaattagg

SEQ ID NO: 76596 - DNA, 15 bp, Homo sapiens
gactaagaattagga

SEQ ID NO: 76597 - DNA, 15 bp, Homo sapiens
actaagaattaggaa

SEQ ID NO: 76598 - DNA, 15 bp, Homo sapiens
ctaagaattaggaaa

SEQ ID NO: 76599 - DNA, 15 bp, Homo sapiens
taagaattaggaaaa

SEQ ID NO: 76600 - DNA, 15 bp, Homo sapiens
aagaattaggaaaat

SEQ ID NO: 76601 - DNA, 15 bp, Homo sapiens
agaattaggaaaatt

SEQ ID NO: 76602 - DNA, 15 bp, Homo sapiens
gaattaggaaaattc

SEQ ID NO: 76603 - DNA, 15 bp, Homo sapiens
aattaggaaaattcc

SEQ ID NO: 76604 - DNA, 15 bp, Homo sapiens
attaggaaaattcct

SEQ ID NO: 76605 - DNA, 15 bp, Homo sapiens
ttaggaaaattccta

SEQ ID NO: 76606 - DNA, 15 bp, Homo sapiens
taggaaaattcctag

SEQ ID NO: 76607 - DNA, 15 bp, Homo sapiens
aggaaaattcctaga

SEQ ID NO: 76608 - DNA, 15 bp, Homo sapiens
ggaaaattcctagac

SEQ ID NO: 76609 - DNA, 15 bp, Homo sapiens
gaaaattcctagact

SEQ ID NO: 76610 - DNA, 15 bp, Homo sapiens
aaaattcctagacta

SEQ ID NO: 76611 - DNA, 15 bp, Homo sapiens
aaattcctagactaa

SEQ ID NO: 76612 - DNA, 15 bp, Homo sapiens
aattcctagactaaa

SEQ ID NO: 76613 - DNA, 15 bp, Homo sapiens
attcctagactaaaa

SEQ ID NO: 76614 - DNA, 15 bp, Homo sapiens
ttcctagactaaaaa

SEQ ID NO: 76615 - DNA, 15 bp, Homo sapiens
tcctagactaaaaat

SEQ ID NO: 76616 - DNA, 15 bp, Homo sapiens
cctagactaaaaata

SEQ ID NO: 76617 - DNA, 15 bp, Homo sapiens
ctagactaaaaatag

SEQ ID NO: 76618 - DNA, 15 bp, Homo sapiens
tagactaaaaatagt

SEQ ID NO: 76619 - DNA, 15 bp, Homo sapiens
agactaaaaatagta

SEQ ID NO: 76620 - DNA, 15 bp, Homo sapiens
gactaaaaatagtat

SEQ ID NO: 76621 - DNA, 15 bp, Homo sapiens
actaaaaatagtata

SEQ ID NO: 76622 - DNA, 15 bp, Homo sapiens
ctaaaaatagtataa

SEQ ID NO: 76623 - DNA, 15 bp, Homo sapiens
taaaaatagtataag

SEQ ID NO: 76624 - DNA, 15 bp, Homo sapiens
aaaaatagtataagg

SEQ ID NO: 76625 - DNA, 15 bp, Homo sapiens
aaaatagtataagga

SEQ ID NO: 76626 - DNA, 15 bp, Homo sapiens
aaatagtataaggag

SEQ ID NO: 76627 - DNA, 15 bp, Homo sapiens
aatagtataaggaga

SEQ ID NO: 76628 - DNA, 15 bp, Homo sapiens
atagtataaggagag

SEQ ID NO: 76629 - DNA, 15 bp, Homo sapiens
tagtataaggagagg

SEQ ID NO: 76630 - DNA, 15 bp, Homo sapiens
agtataaggagaggg

SEQ ID NO: 76631 - DNA, 15 bp, Homo sapiens
gtataaggagagggt

SEQ ID NO: 76632 - DNA, 15 bp, Homo sapiens
tataaggagagggtt

SEQ ID NO: 76633 - DNA, 15 bp, Homo sapiens
ataaggagagggttt

SEQ ID NO: 76634 - DNA, 15 bp, Homo sapiens
taaggagagggttta

SEQ ID NO: 76635 - DNA, 15 bp, Homo sapiens
aaggagagggtttac

SEQ ID NO: 76636 - DNA, 15 bp, Homo sapiens
aggagagggtttacc

SEQ ID NO: 76637 - DNA, 15 bp, Homo sapiens
ggagagggtttacct

SEQ ID NO: 76638 - DNA, 15 bp, Homo sapiens
gagagggtttaccta

SEQ ID NO: 76639 - DNA, 15 bp, Homo sapiens
agagggtttacctac

SEQ ID NO: 76640 - DNA, 15 bp, Homo sapiens
gagggtttacctact

SEQ ID NO: 76641 - DNA, 15 bp, Homo sapiens
agggtttacctacta

SEQ ID NO: 76642 - DNA, 15 bp, Homo sapiens
gggtttacctactat

SEQ ID NO: 76643 - DNA, 15 bp, Homo sapiens
ggtttacctactatt

SEQ ID NO: 76644 - DNA, 15 bp, Homo sapiens
gtttacctactattt

SEQ ID NO: 76645 - DNA, 15 bp, Homo sapiens
tttacctactatttg

SEQ ID NO: 76646 - DNA, 15 bp, Homo sapiens
ttacctactatttga

SEQ ID NO: 76647 - DNA, 15 bp, Homo sapiens
tacctactatttgag

SEQ ID NO: 76648 - DNA, 15 bp, Homo sapiens
acctactatttgagg

SEQ ID NO: 76649 - DNA, 15 bp, Homo sapiens
cctactatttgaggc

SEQ ID NO: 76650 - DNA, 15 bp, Homo sapiens
ctactatttgaggca

SEQ ID NO: 76651 - DNA, 15 bp, Homo sapiens
tactatttgaggcag

SEQ ID NO: 76652 - DNA, 15 bp, Homo sapiens
actatttgaggcagt

SEQ ID NO: 76653 - DNA, 15 bp, Homo sapiens
ctatttgaggcagtt

SEQ ID NO: 76654 - DNA, 15 bp, Homo sapiens
tatttgaggcagttg

SEQ ID NO: 76655 - DNA, 15 bp, Homo sapiens
atttgaggcagttgg

SEQ ID NO: 76656 - DNA, 15 bp, Homo sapiens
tttgaggcagttggt

SEQ ID NO: 76657 - DNA, 15 bp, Homo sapiens
ttgaggcagttggtc

SEQ ID NO: 76658 - DNA, 15 bp, Homo sapiens
tgaggcagttggtct

SEQ ID NO: 76659 - DNA, 15 bp, Homo sapiens
gaggcagttggtcta

SEQ ID NO: 76660 - DNA, 15 bp, Homo sapiens
aggcagttggtctaa

SEQ ID NO: 76661 - DNA, 15 bp, Homo sapiens
ggcagttggtctaat

SEQ ID NO: 76662 - DNA, 15 bp, Homo sapiens
gcagttggtctaata

SEQ ID NO: 76663 - DNA, 15 bp, Homo sapiens
cagttggtctaatag

SEQ ID NO: 76664 - DNA, 15 bp, Homo sapiens
agttggtctaatagt

SEQ ID NO: 76665 - DNA, 15 bp, Homo sapiens
gttggtctaatagta

SEQ ID NO: 76666 - DNA, 15 bp, Homo sapiens
ttggtctaatagtaa

SEQ ID NO: 76667 - DNA, 15 bp, Homo sapiens
tggtctaatagtaag

SEQ ID NO: 76668 - DNA, 15 bp, Homo sapiens
ggtctaatagtaagc

SEQ ID NO: 76669 - DNA, 15 bp, Homo sapiens
gtctaatagtaagca

SEQ ID NO: 76670 - DNA, 15 bp, Homo sapiens
tctaatagtaagcaa

SEQ ID NO: 76671 - DNA, 15 bp, Homo sapiens
ctaatagtaagcaat

SEQ ID NO: 76672 - DNA, 15 bp, Homo sapiens
taatagtaagcaatc

SEQ ID NO: 76673 - DNA, 15 bp, Homo sapiens
aatagtaagcaatca

SEQ ID NO: 76674 - DNA, 15 bp, Homo sapiens
atagtaagcaatcac

SEQ ID NO: 76675 - DNA, 15 bp, Homo sapiens
tagtaagcaatcaca

SEQ ID NO: 76676 - DNA, 15 bp, Homo sapiens
agtaagcaatcacag

SEQ ID NO: 76677 - DNA, 15 bp, Homo sapiens
gtaagcaatcacagg

SEQ ID NO: 76678 - DNA, 15 bp, Homo sapiens
taagcaatcacaggg

SEQ ID NO: 76679 - DNA, 15 bp, Homo sapiens
aagcaatcacaggga

SEQ ID NO: 76680 - DNA, 15 bp, Homo sapiens
agcaatcacagggag

SEQ ID NO: 76681 - DNA, 15 bp, Homo sapiens
gcaatcacagggaga

SEQ ID NO: 76682 - DNA, 15 bp, Homo sapiens
caatcacagggagaa

SEQ ID NO: 76683 - DNA, 15 bp, Homo sapiens
aatcacagggagaaa

SEQ ID NO: 76684 - DNA, 15 bp, Homo sapiens
atcacagggagaaag

SEQ ID NO: 76685 - DNA, 15 bp, Homo sapiens
tcacagggagaaagc

SEQ ID NO: 76686 - DNA, 15 bp, Homo sapiens
cacagggagaaagca

SEQ ID NO: 76687 - DNA, 15 bp, Homo sapiens
acagggagaaagcag

SEQ ID NO: 76688 - DNA, 15 bp, Homo sapiens
cagggagaaagcaga

SEQ ID NO: 76689 - DNA, 15 bp, Homo sapiens
agggagaaagcagaa

SEQ ID NO: 76690 - DNA, 15 bp, Homo sapiens
gggagaaagcagaac

SEQ ID NO: 76691 - DNA, 15 bp, Homo sapiens
ggagaaagcagaact

SEQ ID NO: 76692 - DNA, 15 bp, Homo sapiens
gagaaagcagaacta

SEQ ID NO: 76693 - DNA, 15 bp, Homo sapiens
agaaagcagaactac

SEQ ID NO: 76694 - DNA, 15 bp, Homo sapiens
gaaagcagaactact

SEQ ID NO: 76695 - DNA, 15 bp, Homo sapiens
aaagcagaactactt

SEQ ID NO: 76696 - DNA, 15 bp, Homo sapiens
aagcagaactactta

SEQ ID NO: 76697 - DNA, 15 bp, Homo sapiens
agcagaactacttaa

SEQ ID NO: 76698 - DNA, 15 bp, Homo sapiens
gcagaactacttaac

SEQ ID NO: 76699 - DNA, 15 bp, Homo sapiens
cagaactacttaact

SEQ ID NO: 76700 - DNA, 15 bp, Homo sapiens
agaactacttaactc

SEQ ID NO: 76701 - DNA, 15 bp, Homo sapiens
gaactacttaactct

SEQ ID NO: 76702 - DNA, 15 bp, Homo sapiens
aactacttaactctt

SEQ ID NO: 76703 - DNA, 15 bp, Homo sapiens
actacttaactcttc

SEQ ID NO: 76704 - DNA, 15 bp, Homo sapiens
ctacttaactcttct

SEQ ID NO: 76705 - DNA, 15 bp, Homo sapiens
tacttaactcttctg

SEQ ID NO: 76706 - DNA, 15 bp, Homo sapiens
acttaactcttctgt

SEQ ID NO: 76707 - DNA, 15 bp, Homo sapiens
cttaactcttctgtg

SEQ ID NO: 76708 - DNA, 15 bp, Homo sapiens
ttaactcttctgtgt

SEQ ID NO: 76709 - DNA, 15 bp, Homo sapiens
taactcttctgtgtt

SEQ ID NO: 76710 - DNA, 15 bp, Homo sapiens
aactcttctgtgttg

SEQ ID NO: 76711 - DNA, 15 bp, Homo sapiens
actcttctgtgttga

SEQ ID NO: 76712 - DNA, 15 bp, Homo sapiens
ctcttctgtgttgag

SEQ ID NO: 76713 - DNA, 15 bp, Homo sapiens
tcttctgtgttgagg

SEQ ID NO: 76714 - DNA, 15 bp, Homo sapiens
cttctgtgttgagga

SEQ ID NO: 76715 - DNA, 15 bp, Homo sapiens
ttctgtgttgaggaa

SEQ ID NO: 76716 - DNA, 15 bp, Homo sapiens
tctgtgttgaggaat

SEQ ID NO: 76717 - DNA, 15 bp, Homo sapiens
ctgtgttgaggaatg

SEQ ID NO: 76718 - DNA, 15 bp, Homo sapiens
tgtgttgaggaatga

SEQ ID NO: 76719 - DNA, 15 bp, Homo sapiens
gtgttgaggaatgac

SEQ ID NO: 76720 - DNA, 15 bp, Homo sapiens
tgttgaggaatgaca

SEQ ID NO: 76721 - DNA, 15 bp, Homo sapiens
gttgaggaatgacat

SEQ ID NO: 76722 - DNA, 15 bp, Homo sapiens
ttgaggaatgacata

SEQ ID NO: 76723 - DNA, 15 bp, Homo sapiens
tgaggaatgacataa

SEQ ID NO: 76724 - DNA, 15 bp, Homo sapiens
gaggaatgacataaa

SEQ ID NO: 76725 - DNA, 15 bp, Homo sapiens
aggaatgacataaaa

SEQ ID NO: 76726 - DNA, 15 bp, Homo sapiens
ggaatgacataaaag

SEQ ID NO: 76727 - DNA, 15 bp, Homo sapiens
gaatgacataaaagg

SEQ ID NO: 76728 - DNA, 15 bp, Homo sapiens
aatgacataaaaggt

SEQ ID NO: 76729 - DNA, 15 bp, Homo sapiens
atgacataaaaggta

SEQ ID NO: 76730 - DNA, 15 bp, Homo sapiens
tgacataaaaggtag

SEQ ID NO: 76731 - DNA, 15 bp, Homo sapiens
gacataaaaggtagg

SEQ ID NO: 76732 - DNA, 15 bp, Homo sapiens
acataaaaggtagga

SEQ ID NO: 76733 - DNA, 15 bp, Homo sapiens
cataaaaggtaggaa

SEQ ID NO: 76734 - DNA, 15 bp, Homo sapiens
ataaaaggtaggaaa

SEQ ID NO: 76735 - DNA, 15 bp, Homo sapiens
taaaaggtaggaaag

SEQ ID NO: 76736 - DNA, 15 bp, Homo sapiens
aaaaggtaggaaagg

SEQ ID NO: 76737 - DNA, 15 bp, Homo sapiens
aaaggtaggaaagga

SEQ ID NO: 76738 - DNA, 15 bp, Homo sapiens
aaggtaggaaaggat

SEQ ID NO: 76739 - DNA, 15 bp, Homo sapiens
aggtaggaaaggata

SEQ ID NO: 76740 - DNA, 15 bp, Homo sapiens
ggtaggaaaggatat

SEQ ID NO: 76741 - DNA, 15 bp, Homo sapiens
gtaggaaaggatata

SEQ ID NO: 76742 - DNA, 15 bp, Homo sapiens
taggaaaggatataa

SEQ ID NO: 76743 - DNA, 15 bp, Homo sapiens
aggaaaggatataac

SEQ ID NO: 76744 - DNA, 15 bp, Homo sapiens
ggaaaggatataaca

SEQ ID NO: 76745 - DNA, 15 bp, Homo sapiens
gaaaggatataacaa

SEQ ID NO: 76746 - DNA, 15 bp, Homo sapiens
aaaggatataacaaa

SEQ ID NO: 76747 - DNA, 15 bp, Homo sapiens
aaggatataacaaat

SEQ ID NO: 76748 - DNA, 15 bp, Homo sapiens
aggatataacaaatg

SEQ ID NO: 76749 - DNA, 15 bp, Homo sapiens
ggatataacaaatgt

SEQ ID NO: 76750 - DNA, 15 bp, Homo sapiens
gatataacaaatgtt

SEQ ID NO: 76751 - DNA, 15 bp, Homo sapiens
atataacaaatgttg

SEQ ID NO: 76752 - DNA, 15 bp, Homo sapiens
tataacaaatgttga

SEQ ID NO: 76753 - DNA, 15 bp, Homo sapiens
ataacaaatgttgat

SEQ ID NO: 76754 - DNA, 15 bp, Homo sapiens
taacaaatgttgata

SEQ ID NO: 76755 - DNA, 15 bp, Homo sapiens
aacaaatgttgataa

SEQ ID NO: 76756 - DNA, 15 bp, Homo sapiens
acaaatgttgataag

SEQ ID NO: 76757 - DNA, 15 bp, Homo sapiens
caaatgttgataaga

SEQ ID NO: 76758 - DNA, 15 bp, Homo sapiens
aaatgttgataagag

SEQ ID NO: 76759 - DNA, 15 bp, Homo sapiens
aatgttgataagagg

SEQ ID NO: 76760 - DNA, 15 bp, Homo sapiens
atgttgataagagga

SEQ ID NO: 76761 - DNA, 15 bp, Homo sapiens
tgttgataagaggag

SEQ ID NO: 76762 - DNA, 15 bp, Homo sapiens
gttgataagaggagt

SEQ ID NO: 76763 - DNA, 15 bp, Homo sapiens
ttgataagaggagtc

SEQ ID NO: 76764 - DNA, 15 bp, Homo sapiens
tgataagaggagtct

SEQ ID NO: 76765 - DNA, 15 bp, Homo sapiens
gataagaggagtctg

SEQ ID NO: 76766 - DNA, 15 bp, Homo sapiens
ataagaggagtctga

SEQ ID NO: 76767 - DNA, 15 bp, Homo sapiens
taagaggagtctgat

SEQ ID NO: 76768 - DNA, 15 bp, Homo sapiens
aagaggagtctgatg

SEQ ID NO: 76769 - DNA, 15 bp, Homo sapiens
agaggagtctgatgg

SEQ ID NO: 76770 - DNA, 15 bp, Homo sapiens
gaggagtctgatgga

SEQ ID NO: 76771 - DNA, 15 bp, Homo sapiens
aggagtctgatggat

SEQ ID NO: 76772 - DNA, 15 bp, Homo sapiens
ggagtctgatggatg

SEQ ID NO: 76773 - DNA, 15 bp, Homo sapiens
gagtctgatggatga

SEQ ID NO: 76774 - DNA, 15 bp, Homo sapiens
agtctgatggatgag

SEQ ID NO: 76775 - DNA, 15 bp, Homo sapiens
gtctgatggatgaga

SEQ ID NO: 76776 - DNA, 15 bp, Homo sapiens
tctgatggatgagag

SEQ ID NO: 76777 - DNA, 15 bp, Homo sapiens
ctgatggatgagagg

SEQ ID NO: 76778 - DNA, 15 bp, Homo sapiens
tgatggatgagagga

SEQ ID NO: 76779 - DNA, 15 bp, Homo sapiens
gatggatgagaggag

SEQ ID NO: 76780 - DNA, 15 bp, Homo sapiens
atggatgagaggagg

SEQ ID NO: 76781 - DNA, 15 bp, Homo sapiens
tggatgagaggaggg

SEQ ID NO: 76782 - DNA, 15 bp, Homo sapiens
ggatgagaggaggga

SEQ ID NO: 76783 - DNA, 15 bp, Homo sapiens
gatgagaggagggaa

SEQ ID NO: 76784 - DNA, 15 bp, Homo sapiens
atgagaggagggaac

SEQ ID NO: 76785 - DNA, 15 bp, Homo sapiens
tgagaggagggaact

SEQ ID NO: 76786 - DNA, 15 bp, Homo sapiens
gagaggagggaactg

SEQ ID NO: 76787 - DNA, 15 bp, Homo sapiens
agaggagggaactgc

SEQ ID NO: 76788 - DNA, 15 bp, Homo sapiens
gaggagggaactgct

SEQ ID NO: 76789 - DNA, 15 bp, Homo sapiens
aggagggaactgctt

SEQ ID NO: 76790 - DNA, 15 bp, Homo sapiens
ggagggaactgcttt

SEQ ID NO: 76791 - DNA, 15 bp, Homo sapiens
gagggaactgcttta

SEQ ID NO: 76792 - DNA, 15 bp, Homo sapiens
agggaactgctttaa

SEQ ID NO: 76793 - DNA, 15 bp, Homo sapiens
gggaactgctttaaa

SEQ ID NO: 76794 - DNA, 15 bp, Homo sapiens
ggaactgctttaaat

SEQ ID NO: 76795 - DNA, 15 bp, Homo sapiens
gaactgctttaaatg

SEQ ID NO: 76796 - DNA, 15 bp, Homo sapiens
aactgctttaaatga

SEQ ID NO: 76797 - DNA, 15 bp, Homo sapiens
actgctttaaatgag

SEQ ID NO: 76798 - DNA, 15 bp, Homo sapiens
ctgctttaaatgagt

SEQ ID NO: 76799 - DNA, 15 bp, Homo sapiens
tgctttaaatgagtt

SEQ ID NO: 76800 - DNA, 15 bp, Homo sapiens
gctttaaatgagttt

SEQ ID NO: 76801 - DNA, 15 bp, Homo sapiens
ctttaaatgagtttc

SEQ ID NO: 76802 - DNA, 15 bp, Homo sapiens
tttaaatgagtttct

SEQ ID NO: 76803 - DNA, 15 bp, Homo sapiens
ttaaatgagtttcta

SEQ ID NO: 76804 - DNA, 15 bp, Homo sapiens
taaatgagtttctac

SEQ ID NO: 76805 - DNA, 15 bp, Homo sapiens
aaatgagtttctact

SEQ ID NO: 76806 - DNA, 15 bp, Homo sapiens
aatgagtttctactt

SEQ ID NO: 76807 - DNA, 15 bp, Homo sapiens
atgagtttctacttc

SEQ ID NO: 76808 - DNA, 15 bp, Homo sapiens
tgagtttctacttca

SEQ ID NO: 76809 - DNA, 15 bp, Homo sapiens
gagtttctacttcag

SEQ ID NO: 76810 - DNA, 15 bp, Homo sapiens
agtttctacttcaga

SEQ ID NO: 76811 - DNA, 15 bp, Homo sapiens
gtttctacttcagac

SEQ ID NO: 76812 - DNA, 15 bp, Homo sapiens
tttctacttcagaca

SEQ ID NO: 76813 - DNA, 15 bp, Homo sapiens
ttctacttcagacat

SEQ ID NO: 76814 - DNA, 15 bp, Homo sapiens
tctacttcagacata

SEQ ID NO: 76815 - DNA, 15 bp, Homo sapiens
ctacttcagacataa

SEQ ID NO: 76816 - DNA, 15 bp, Homo sapiens
tacttcagacataag

SEQ ID NO: 76817 - DNA, 15 bp, Homo sapiens
acttcagacataagt

SEQ ID NO: 76818 - DNA, 15 bp, Homo sapiens
cttcagacataagtt

SEQ ID NO: 76819 - DNA, 15 bp, Homo sapiens
ttcagacataagtta

SEQ ID NO: 76820 - DNA, 15 bp, Homo sapiens
tcagacataagttaa

SEQ ID NO: 76821 - DNA, 15 bp, Homo sapiens
cagacataagttaat

SEQ ID NO: 76822 - DNA, 15 bp, Homo sapiens
agacataagttaatt

SEQ ID NO: 76823 - DNA, 15 bp, Homo sapiens
gacataagttaattc

SEQ ID NO: 76824 - DNA, 15 bp, Homo sapiens
acataagttaattct

SEQ ID NO: 76825 - DNA, 15 bp, Homo sapiens
cataagttaattctc

SEQ ID NO: 76826 - DNA, 15 bp, Homo sapiens
ataagttaattctca

SEQ ID NO: 76827 - DNA, 15 bp, Homo sapiens
taagttaattctcag

SEQ ID NO: 76828 - DNA, 15 bp, Homo sapiens
aagttaattctcaga

SEQ ID NO: 76829 - DNA, 15 bp, Homo sapiens
agttaattctcagag

SEQ ID NO: 76830 - DNA, 15 bp, Homo sapiens
gttaattctcagagc

SEQ ID NO: 76831 - DNA, 15 bp, Homo sapiens
ttaattctcagagcc

SEQ ID NO: 76832 - DNA, 15 bp, Homo sapiens
taattctcagagccc

SEQ ID NO: 76833 - DNA, 15 bp, Homo sapiens
aattctcagagccca

SEQ ID NO: 76834 - DNA, 15 bp, Homo sapiens
attctcagagcccac

SEQ ID NO: 76835 - DNA, 15 bp, Homo sapiens
ttctcagagcccaca

SEQ ID NO: 76836 - DNA, 15 bp, Homo sapiens
tctcagagcccacaa

SEQ ID NO: 76837 - DNA, 15 bp, Homo sapiens
ctcagagcccacaaa

SEQ ID NO: 76838 - DNA, 15 bp, Homo sapiens
tcagagcccacaaaa

SEQ ID NO: 76839 - DNA, 15 bp, Homo sapiens
cagagcccacaaaaa

SEQ ID NO: 76840 - DNA, 15 bp, Homo sapiens
agagcccacaaaaac

SEQ ID NO: 76841 - DNA, 15 bp, Homo sapiens
gagcccacaaaaact

SEQ ID NO: 76842 - DNA, 15 bp, Homo sapiens
agcccacaaaaactt

SEQ ID NO: 76843 - DNA, 15 bp, Homo sapiens
gcccacaaaaacttt

SEQ ID NO: 76844 - DNA, 15 bp, Homo sapiens
cccacaaaaactttc

SEQ ID NO: 76845 - DNA, 15 bp, Homo sapiens
ccacaaaaactttca

SEQ ID NO: 76846 - DNA, 15 bp, Homo sapiens
cacaaaaactttcac

SEQ ID NO: 76847 - DNA, 15 bp, Homo sapiens
acaaaaactttcact

SEQ ID NO: 76848 - DNA, 15 bp, Homo sapiens
caaaaactttcactt

SEQ ID NO: 76849 - DNA, 15 bp, Homo sapiens
aaaaactttcacttt

SEQ ID NO: 76850 - DNA, 15 bp, Homo sapiens
aaaactttcactttt

SEQ ID NO: 76851 - DNA, 15 bp, Homo sapiens
aaactttcactttta

SEQ ID NO: 76852 - DNA, 15 bp, Homo sapiens
aactttcacttttat

SEQ ID NO: 76853 - DNA, 15 bp, Homo sapiens
actttcacttttatt

SEQ ID NO: 76854 - DNA, 15 bp, Homo sapiens
ctttcacttttattt

SEQ ID NO: 76855 - DNA, 15 bp, Homo sapiens
tttcacttttatttg

SEQ ID NO: 76856 - DNA, 15 bp, Homo sapiens
ttcacttttatttgt

SEQ ID NO: 76857 - DNA, 15 bp, Homo sapiens
tcacttttatttgtg

SEQ ID NO: 76858 - DNA, 15 bp, Homo sapiens
cacttttatttgtga

SEQ ID NO: 76859 - DNA, 15 bp, Homo sapiens
acttttatttgtgaa

SEQ ID NO: 76860 - DNA, 15 bp, Homo sapiens
cttttatttgtgaaa

SEQ ID NO: 76861 - DNA, 15 bp, Homo sapiens
ttttatttgtgaaat

SEQ ID NO: 76862 - DNA, 15 bp, Homo sapiens
tttatttgtgaaata

SEQ ID NO: 76863 - DNA, 15 bp, Homo sapiens
ttatttgtgaaatac

SEQ ID NO: 76864 - DNA, 15 bp, Homo sapiens
tatttgtgaaataca

SEQ ID NO: 76865 - DNA, 15 bp, Homo sapiens
atttgtgaaatacaa

SEQ ID NO: 76866 - DNA, 15 bp, Homo sapiens
tttgtgaaatacaac

SEQ ID NO: 76867 - DNA, 15 bp, Homo sapiens
ttgtgaaatacaact

SEQ ID NO: 76868 - DNA, 15 bp, Homo sapiens
tgtgaaatacaactc

SEQ ID NO: 76869 - DNA, 15 bp, Homo sapiens
gtgaaatacaactca

SEQ ID NO: 76870 - DNA, 15 bp, Homo sapiens
tgaaatacaactcag

SEQ ID NO: 76871 - DNA, 15 bp, Homo sapiens
gaaatacaactcagt

SEQ ID NO: 76872 - DNA, 15 bp, Homo sapiens
aaatacaactcagtt

SEQ ID NO: 76873 - DNA, 15 bp, Homo sapiens
aatacaactcagttc

SEQ ID NO: 76874 - DNA, 15 bp, Homo sapiens
atacaactcagttct

SEQ ID NO: 76875 - DNA, 15 bp, Homo sapiens
tacaactcagttctc

SEQ ID NO: 76876 - DNA, 15 bp, Homo sapiens
acaactcagttctca

SEQ ID NO: 76877 - DNA, 15 bp, Homo sapiens
caactcagttctcat

SEQ ID NO: 76878 - DNA, 15 bp, Homo sapiens
aactcagttctcatg

SEQ ID NO: 76879 - DNA, 15 bp, Homo sapiens
actcagttctcatgg

SEQ ID NO: 76880 - DNA, 15 bp, Homo sapiens
ctcagttctcatggc

SEQ ID NO: 76881 - DNA, 15 bp, Homo sapiens
tcagttctcatggct

SEQ ID NO: 76882 - DNA, 15 bp, Homo sapiens
cagttctcatggctt

SEQ ID NO: 76883 - DNA, 15 bp, Homo sapiens
agttctcatggctta

SEQ ID NO: 76884 - DNA, 15 bp, Homo sapiens
gttctcatggcttaa

SEQ ID NO: 76885 - DNA, 15 bp, Homo sapiens
ttctcatggcttaac

SEQ ID NO: 76886 - DNA, 15 bp, Homo sapiens
tctcatggcttaaca

SEQ ID NO: 76887 - DNA, 15 bp, Homo sapiens
ctcatggcttaacac

SEQ ID NO: 76888 - DNA, 15 bp, Homo sapiens
tcatggcttaacact

SEQ ID NO: 76889 - DNA, 15 bp, Homo sapiens
catggcttaacactt

SEQ ID NO: 76890 - DNA, 15 bp, Homo sapiens
atggcttaacacttt

SEQ ID NO: 76891 - DNA, 15 bp, Homo sapiens
tggcttaacacttta

SEQ ID NO: 76892 - DNA, 15 bp, Homo sapiens
ggcttaacactttaa

SEQ ID NO: 76893 - DNA, 15 bp, Homo sapiens
gcttaacactttaaa

SEQ ID NO: 76894 - DNA, 15 bp, Homo sapiens
cttaacactttaaac

SEQ ID NO: 76895 - DNA, 15 bp, Homo sapiens
ttaacactttaaacc

SEQ ID NO: 76896 - DNA, 15 bp, Homo sapiens
taacactttaaacca

SEQ ID NO: 76897 - DNA, 15 bp, Homo sapiens
aacactttaaaccat

SEQ ID NO: 76898 - DNA, 15 bp, Homo sapiens
acactttaaaccatg

SEQ ID NO: 76899 - DNA, 15 bp, Homo sapiens
cactttaaaccatga

SEQ ID NO: 76900 - DNA, 15 bp, Homo sapiens
actttaaaccatgag

SEQ ID NO: 76901 - DNA, 15 bp, Homo sapiens
ctttaaaccatgaga

SEQ ID NO: 76902 - DNA, 15 bp, Homo sapiens
tttaaaccatgagaa

SEQ ID NO: 76903 - DNA, 15 bp, Homo sapiens
ttaaaccatgagaaa

SEQ ID NO: 76904 - DNA, 15 bp, Homo sapiens
taaaccatgagaaaa

SEQ ID NO: 76905 - DNA, 15 bp, Homo sapiens
aaaccatgagaaaac

SEQ ID NO: 76906 - DNA, 15 bp, Homo sapiens
aaccatgagaaaact

SEQ ID NO: 76907 - DNA, 15 bp, Homo sapiens
accatgagaaaactg

SEQ ID NO: 76908 - DNA, 15 bp, Homo sapiens
ccatgagaaaactga

SEQ ID NO: 76909 - DNA, 15 bp, Homo sapiens
catgagaaaactgaa

SEQ ID NO: 76910 - DNA, 15 bp, Homo sapiens
atgagaaaactgaag

SEQ ID NO: 76911 - DNA, 15 bp, Homo sapiens
tgagaaaactgaaga

SEQ ID NO: 76912 - DNA, 15 bp, Homo sapiens
gagaaaactgaagag

SEQ ID NO: 76913 - DNA, 15 bp, Homo sapiens
agaaaactgaagagt

SEQ ID NO: 76914 - DNA, 15 bp, Homo sapiens
gaaaactgaagagtt

SEQ ID NO: 76915 - DNA, 15 bp, Homo sapiens
aaaactgaagagttg

SEQ ID NO: 76916 - DNA, 15 bp, Homo sapiens
aaactgaagagttga

SEQ ID NO: 76917 - DNA, 15 bp, Homo sapiens
aactgaagagttgag

SEQ ID NO: 76918 - DNA, 15 bp, Homo sapiens
actgaagagttgaga

SEQ ID NO: 76919 - DNA, 15 bp, Homo sapiens
ctgaagagttgagaa

SEQ ID NO: 76920 - DNA, 15 bp, Homo sapiens
tgaagagttgagaag

SEQ ID NO: 76921 - DNA, 15 bp, Homo sapiens
gaagagttgagaagc

SEQ ID NO: 76922 - DNA, 15 bp, Homo sapiens
aagagttgagaagct

SEQ ID NO: 76923 - DNA, 15 bp, Homo sapiens
agagttgagaagctt

SEQ ID NO: 76924 - DNA, 15 bp, Homo sapiens
gagttgagaagcttg

SEQ ID NO: 76925 - DNA, 15 bp, Homo sapiens
agttgagaagcttgg

SEQ ID NO: 76926 - DNA, 15 bp, Homo sapiens
gttgagaagcttggc

SEQ ID NO: 76927 - DNA, 15 bp, Homo sapiens
ttgagaagcttggca

SEQ ID NO: 76928 - DNA, 15 bp, Homo sapiens
tgagaagcttggcag

SEQ ID NO: 76929 - DNA, 15 bp, Homo sapiens
gagaagcttggcaga

SEQ ID NO: 76930 - DNA, 15 bp, Homo sapiens
agaagcttggcagat

SEQ ID NO: 76931 - DNA, 15 bp, Homo sapiens
gaagcttggcagatg

SEQ ID NO: 76932 - DNA, 15 bp, Homo sapiens
aagcttggcagatgc

SEQ ID NO: 76933 - DNA, 15 bp, Homo sapiens
agcttggcagatgct

SEQ ID NO: 76934 - DNA, 15 bp, Homo sapiens
gcttggcagatgctg

SEQ ID NO: 76935 - DNA, 15 bp, Homo sapiens
cttggcagatgctgc

SEQ ID NO: 76936 - DNA, 15 bp, Homo sapiens
ttggcagatgctgct

SEQ ID NO: 76937 - DNA, 15 bp, Homo sapiens
tggcagatgctgctg

SEQ ID NO: 76938 - DNA, 15 bp, Homo sapiens
ggcagatgctgctgt

SEQ ID NO: 76939 - DNA, 15 bp, Homo sapiens
gcagatgctgctgtg

SEQ ID NO: 76940 - DNA, 15 bp, Homo sapiens
cagatgctgctgtga

SEQ ID NO: 76941 - DNA, 15 bp, Homo sapiens
agatgctgctgtgat

SEQ ID NO: 76942 - DNA, 15 bp, Homo sapiens
gatgctgctgtgata

SEQ ID NO: 76943 - DNA, 15 bp, Homo sapiens
atgctgctgtgatag

SEQ ID NO: 76944 - DNA, 15 bp, Homo sapiens
tgctgctgtgatagt

SEQ ID NO: 76945 - DNA, 15 bp, Homo sapiens
gctgctgtgatagtc

SEQ ID NO: 76946 - DNA, 15 bp, Homo sapiens
ctgctgtgatagtca

SEQ ID NO: 76947 - DNA, 15 bp, Homo sapiens
tgctgtgatagtcaa

SEQ ID NO: 76948 - DNA, 15 bp, Homo sapiens
gctgtgatagtcaaa

SEQ ID NO: 76949 - DNA, 15 bp, Homo sapiens
ctgtgatagtcaaaa

SEQ ID NO: 76950 - DNA, 15 bp, Homo sapiens
tgtgatagtcaaaaa

SEQ ID NO: 76951 - DNA, 15 bp, Homo sapiens
gtgatagtcaaaaag

SEQ ID NO: 76952 - DNA, 15 bp, Homo sapiens
tgatagtcaaaaaga

SEQ ID NO: 76953 - DNA, 15 bp, Homo sapiens
gatagtcaaaaagaa

SEQ ID NO: 76954 - DNA, 15 bp, Homo sapiens
atagtcaaaaagaaa

SEQ ID NO: 76955 - DNA, 15 bp, Homo sapiens
tagtcaaaaagaaag

SEQ ID NO: 76956 - DNA, 15 bp, Homo sapiens
agtcaaaaagaaagt

SEQ ID NO: 76957 - DNA, 15 bp, Homo sapiens
gtcaaaaagaaagtg

SEQ ID NO: 76958 - DNA, 15 bp, Homo sapiens
tcaaaaagaaagtgg

SEQ ID NO: 76959 - DNA, 15 bp, Homo sapiens
caaaaagaaagtggg

SEQ ID NO: 76960 - DNA, 15 bp, Homo sapiens
aaaaagaaagtgggt

SEQ ID NO: 76961 - DNA, 15 bp, Homo sapiens
aaaagaaagtgggtg

SEQ ID NO: 76962 - DNA, 15 bp, Homo sapiens
aaagaaagtgggtgc

SEQ ID NO: 76963 - DNA, 15 bp, Homo sapiens
aagaaagtgggtgcc

SEQ ID NO: 76964 - DNA, 15 bp, Homo sapiens
agaaagtgggtgcca

SEQ ID NO: 76965 - DNA, 15 bp, Homo sapiens
gaaagtgggtgccat

SEQ ID NO: 76966 - DNA, 15 bp, Homo sapiens
aaagtgggtgccatg

SEQ ID NO: 76967 - DNA, 15 bp, Homo sapiens
aagtgggtgccatga

SEQ ID NO: 76968 - DNA, 15 bp, Homo sapiens
agtgggtgccatgag

SEQ ID NO: 76969 - DNA, 15 bp, Homo sapiens
gtgggtgccatgagc

SEQ ID NO: 76970 - DNA, 15 bp, Homo sapiens
tgggtgccatgagct

SEQ ID NO: 76971 - DNA, 15 bp, Homo sapiens
gggtgccatgagcta

SEQ ID NO: 76972 - DNA, 15 bp, Homo sapiens
ggtgccatgagctac

SEQ ID NO: 76973 - DNA, 15 bp, Homo sapiens
gtgccatgagctact

SEQ ID NO: 76974 - DNA, 15 bp, Homo sapiens
tgccatgagctacta

SEQ ID NO: 76975 - DNA, 15 bp, Homo sapiens
gccatgagctactat

SEQ ID NO: 76976 - DNA, 15 bp, Homo sapiens
ccatgagctactatt

SEQ ID NO: 76977 - DNA, 15 bp, Homo sapiens
catgagctactattg

SEQ ID NO: 76978 - DNA, 15 bp, Homo sapiens
atgagctactattga

SEQ ID NO: 76979 - DNA, 15 bp, Homo sapiens
tgagctactattgat

SEQ ID NO: 76980 - DNA, 15 bp, Homo sapiens
gagctactattgatg

SEQ ID NO: 76981 - DNA, 15 bp, Homo sapiens
agctactattgatgt

SEQ ID NO: 76982 - DNA, 15 bp, Homo sapiens
gctactattgatgta

SEQ ID NO: 76983 - DNA, 15 bp, Homo sapiens
ctactattgatgtat

SEQ ID NO: 76984 - DNA, 15 bp, Homo sapiens
tactattgatgtatt

SEQ ID NO: 76985 - DNA, 15 bp, Homo sapiens
actattgatgtattt

SEQ ID NO: 76986 - DNA, 15 bp, Homo sapiens
ctattgatgtatttg

SEQ ID NO: 76987 - DNA, 15 bp, Homo sapiens
tattgatgtatttgc

SEQ ID NO: 76988 - DNA, 15 bp, Homo sapiens
attgatgtatttgcc

SEQ ID NO: 76989 - DNA, 15 bp, Homo sapiens
ttgatgtatttgcca

SEQ ID NO: 76990 - DNA, 15 bp, Homo sapiens
tgatgtatttgccat

SEQ ID NO: 76991 - DNA, 15 bp, Homo sapiens
gatgtatttgccatt

SEQ ID NO: 76992 - DNA, 15 bp, Homo sapiens
atgtatttgccattg

SEQ ID NO: 76993 - DNA, 15 bp, Homo sapiens
tgtatttgccattga

SEQ ID NO: 76994 - DNA, 15 bp, Homo sapiens
gtatttgccattgat

SEQ ID NO: 76995 - DNA, 15 bp, Homo sapiens
tatttgccattgatc

SEQ ID NO: 76996 - DNA, 15 bp, Homo sapiens
atttgccattgatcc

SEQ ID NO: 76997 - DNA, 15 bp, Homo sapiens
tttgccattgatccc

SEQ ID NO: 76998 - DNA, 15 bp, Homo sapiens
ttgccattgatccct

SEQ ID NO: 76999 - DNA, 15 bp, Homo sapiens
tgccattgatccctc

SEQ ID NO: 77000 - DNA, 15 bp, Homo sapiens
gccattgatccctcc

SEQ ID NO: 77001 - DNA, 15 bp, Homo sapiens
ccattgatccctcct

SEQ ID NO: 77002 - DNA, 15 bp, Homo sapiens
cattgatccctcctg

SEQ ID NO: 77003 - DNA, 15 bp, Homo sapiens
attgatccctcctga

SEQ ID NO: 77004 - DNA, 15 bp, Homo sapiens
ttgatccctcctgaa

SEQ ID NO: 77005 - DNA, 15 bp, Homo sapiens
tgatccctcctgaaa

SEQ ID NO: 77006 - DNA, 15 bp, Homo sapiens
gatccctcctgaaaa

SEQ ID NO: 77007 - DNA, 15 bp, Homo sapiens
atccctcctgaaaat

SEQ ID NO: 77008 - DNA, 15 bp, Homo sapiens
tccctcctgaaaatc

SEQ ID NO: 77009 - DNA, 15 bp, Homo sapiens
ccctcctgaaaatct

SEQ ID NO: 77010 - DNA, 15 bp, Homo sapiens
cctcctgaaaatcta

SEQ ID NO: 77011 - DNA, 15 bp, Homo sapiens
ctcctgaaaatctag

SEQ ID NO: 77012 - DNA, 15 bp, Homo sapiens
tcctgaaaatctaga

SEQ ID NO: 77013 - DNA, 15 bp, Homo sapiens
cctgaaaatctagaa

SEQ ID NO: 77014 - DNA, 15 bp, Homo sapiens
ctgaaaatctagaat

SEQ ID NO: 77015 - DNA, 15 bp, Homo sapiens
tgaaaatctagaatg

SEQ ID NO: 77016 - DNA, 15 bp, Homo sapiens
gaaaatctagaatgg

SEQ ID NO: 77017 - DNA, 15 bp, Homo sapiens
aaaatctagaatgga

SEQ ID NO: 77018 - DNA, 15 bp, Homo sapiens
aaatctagaatggac

SEQ ID NO: 77019 - DNA, 15 bp, Homo sapiens
aatctagaatggact

SEQ ID NO: 77020 - DNA, 15 bp, Homo sapiens
atctagaatggactt

SEQ ID NO: 77021 - DNA, 15 bp, Homo sapiens
tctagaatggacttt

SEQ ID NO: 77022 - DNA, 15 bp, Homo sapiens
ctagaatggactttc

SEQ ID NO: 77023 - DNA, 15 bp, Homo sapiens
tagaatggactttca

SEQ ID NO: 77024 - DNA, 15 bp, Homo sapiens
agaatggactttcag

SEQ ID NO: 77025 - DNA, 15 bp, Homo sapiens
gaatggactttcaga

SEQ ID NO: 77026 - DNA, 15 bp, Homo sapiens
aatggactttcagac

SEQ ID NO: 77027 - DNA, 15 bp, Homo sapiens
atggactttcagaca

SEQ ID NO: 77028 - DNA, 15 bp, Homo sapiens
tggactttcagacaa

SEQ ID NO: 77029 - DNA, 15 bp, Homo sapiens
ggactttcagacaaa

SEQ ID NO: 77030 - DNA, 15 bp, Homo sapiens
gactttcagacaaat

SEQ ID NO: 77031 - DNA, 15 bp, Homo sapiens
actttcagacaaatg

SEQ ID NO: 77032 - DNA, 15 bp, Homo sapiens
ctttcagacaaatgg

SEQ ID NO: 77033 - DNA, 15 bp, Homo sapiens
tttcagacaaatggt

SEQ ID NO: 77034 - DNA, 15 bp, Homo sapiens
ttcagacaaatggtt

SEQ ID NO: 77035 - DNA, 15 bp, Homo sapiens
tcagacaaatggttt

SEQ ID NO: 77036 - DNA, 15 bp, Homo sapiens
cagacaaatggtttg

SEQ ID NO: 77037 - DNA, 15 bp, Homo sapiens
agacaaatggtttga

SEQ ID NO: 77038 - DNA, 15 bp, Homo sapiens
gacaaatggtttgaa

SEQ ID NO: 77039 - DNA, 15 bp, Homo sapiens
acaaatggtttgaaa

SEQ ID NO: 77040 - DNA, 15 bp, Homo sapiens
caaatggtttgaaaa

SEQ ID NO: 77041 - DNA, 15 bp, Homo sapiens
aaatggtttgaaaat

SEQ ID NO: 77042 - DNA, 15 bp, Homo sapiens
aatggtttgaaaatt

SEQ ID NO: 77043 - DNA, 15 bp, Homo sapiens
atggtttgaaaattc

SEQ ID NO: 77044 - DNA, 15 bp, Homo sapiens
tggtttgaaaattct

SEQ ID NO: 77045 - DNA, 15 bp, Homo sapiens
ggtttgaaaattcta

SEQ ID NO: 77046 - DNA, 15 bp, Homo sapiens
gtttgaaaattctaa

SEQ ID NO: 77047 - DNA, 15 bp, Homo sapiens
tttgaaaattctaaa

SEQ ID NO: 77048 - DNA, 15 bp, Homo sapiens
ttgaaaattctaaat

SEQ ID NO: 77049 - DNA, 15 bp, Homo sapiens
tgaaaattctaaatc

SEQ ID NO: 77050 - DNA, 15 bp, Homo sapiens
gaaaattctaaatca

SEQ ID NO: 77051 - DNA, 15 bp, Homo sapiens
aaaattctaaatcac

SEQ ID NO: 77052 - DNA, 15 bp, Homo sapiens
aaattctaaatcact

SEQ ID NO: 77053 - DNA, 15 bp, Homo sapiens
aattctaaatcacta

SEQ ID NO: 77054 - DNA, 15 bp, Homo sapiens
attctaaatcactaa

SEQ ID NO: 77055 - DNA, 15 bp, Homo sapiens
ttctaaatcactaat

SEQ ID NO: 77056 - DNA, 15 bp, Homo sapiens
tctaaatcactaatg

SEQ ID NO: 77057 - DNA, 15 bp, Homo sapiens
ctaaatcactaatga

SEQ ID NO: 77058 - DNA, 15 bp, Homo sapiens
taaatcactaatgat

SEQ ID NO: 77059 - DNA, 15 bp, Homo sapiens
aaatcactaatgatt

SEQ ID NO: 77060 - DNA, 15 bp, Homo sapiens
aatcactaatgattg

SEQ ID NO: 77061 - DNA, 15 bp, Homo sapiens
atcactaatgattga

SEQ ID NO: 77062 - DNA, 15 bp, Homo sapiens
tcactaatgattgag

SEQ ID NO: 77063 - DNA, 15 bp, Homo sapiens
cactaatgattgaga

SEQ ID NO: 77064 - DNA, 15 bp, Homo sapiens
actaatgattgagat

SEQ ID NO: 77065 - DNA, 15 bp, Homo sapiens
ctaatgattgagatt

SEQ ID NO: 77066 - DNA, 15 bp, Homo sapiens
taatgattgagattt

SEQ ID NO: 77067 - DNA, 15 bp, Homo sapiens
aatgattgagattta

SEQ ID NO: 77068 - DNA, 15 bp, Homo sapiens
atgattgagatttag

SEQ ID NO: 77069 - DNA, 15 bp, Homo sapiens
tgattgagatttagt

SEQ ID NO: 77070 - DNA, 15 bp, Homo sapiens
gattgagatttagta

SEQ ID NO: 77071 - DNA, 15 bp, Homo sapiens
attgagatttagtat

SEQ ID NO: 77072 - DNA, 15 bp, Homo sapiens
ttgagatttagtata

SEQ ID NO: 77073 - DNA, 15 bp, Homo sapiens
tgagatttagtatag

SEQ ID NO: 77074 - DNA, 15 bp, Homo sapiens
gagatttagtatagg

SEQ ID NO: 77075 - DNA, 15 bp, Homo sapiens
agatttagtataggt

SEQ ID NO: 77076 - DNA, 15 bp, Homo sapiens
gatttagtataggtt

SEQ ID NO: 77077 - DNA, 15 bp, Homo sapiens
atttagtataggttt

SEQ ID NO: 77078 - DNA, 15 bp, Homo sapiens
tttagtataggttta

SEQ ID NO: 77079 - DNA, 15 bp, Homo sapiens
ttagtataggtttac

SEQ ID NO: 77080 - DNA, 15 bp, Homo sapiens
tagtataggtttact

SEQ ID NO: 77081 - DNA, 15 bp, Homo sapiens
agtataggtttacta

SEQ ID NO: 77082 - DNA, 15 bp, Homo sapiens
gtataggtttactaa

SEQ ID NO: 77083 - DNA, 15 bp, Homo sapiens
tataggtttactaag

SEQ ID NO: 77084 - DNA, 15 bp, Homo sapiens
ataggtttactaaga

SEQ ID NO: 77085 - DNA, 15 bp, Homo sapiens
taggtttactaagaa

SEQ ID NO: 77086 - DNA, 15 bp, Homo sapiens
aggtttactaagaac

SEQ ID NO: 77087 - DNA, 15 bp, Homo sapiens
ggtttactaagaacg

SEQ ID NO: 77088 - DNA, 15 bp, Homo sapiens
gtttactaagaacgg

SEQ ID NO: 77089 - DNA, 15 bp, Homo sapiens
tttactaagaacggg

SEQ ID NO: 77090 - DNA, 15 bp, Homo sapiens
ttactaagaacgggt

SEQ ID NO: 77091 - DNA, 15 bp, Homo sapiens
tactaagaacgggtt

SEQ ID NO: 77092 - DNA, 15 bp, Homo sapiens
actaagaacgggttt

SEQ ID NO: 77093 - DNA, 15 bp, Homo sapiens
ctaagaacgggtttt

SEQ ID NO: 77094 - DNA, 15 bp, Homo sapiens
taagaacgggttttt

SEQ ID NO: 77095 - DNA, 15 bp, Homo sapiens
aagaacgggtttttt

SEQ ID NO: 77096 - DNA, 15 bp, Homo sapiens
agaacgggttttttt

SEQ ID NO: 77097 - DNA, 15 bp, Homo sapiens
gaacgggtttttttt

SEQ ID NO: 77098 - DNA, 15 bp, Homo sapiens
aacgggttttttttg

SEQ ID NO: 77099 - DNA, 15 bp, Homo sapiens
acgggttttttttgt

SEQ ID NO: 77100 - DNA, 15 bp, Homo sapiens
cgggttttttttgtt

SEQ ID NO: 77101 - DNA, 15 bp, Homo sapiens
gggttttttttgttt

SEQ ID NO: 77102 - DNA, 15 bp, Homo sapiens
ggttttttttgtttt

SEQ ID NO: 77103 - DNA, 15 bp, Homo sapiens
gttttttttgttttt

SEQ ID NO: 77104 - DNA, 15 bp, Homo sapiens
ttttttttgtttttg

SEQ ID NO: 77105 - DNA, 15 bp, Homo sapiens
tttttttgtttttgt

SEQ ID NO: 77106 - DNA, 15 bp, Homo sapiens
tgtttttgtttttgg

SEQ ID NO: 77107 - DNA, 15 bp, Homo sapiens
gtttttgtttttggt

SEQ ID NO: 77108 - DNA, 15 bp, Homo sapiens
tttttgtttttggtg

SEQ ID NO: 77109 - DNA, 15 bp, Homo sapiens
ttttgtttttggtgg

SEQ ID NO: 77110 - DNA, 15 bp, Homo sapiens
tttgtttttggtgga

SEQ ID NO: 77111 - DNA, 15 bp, Homo sapiens
ttgtttttggtggat

SEQ ID NO: 77112 - DNA, 15 bp, Homo sapiens
tgtttttggtggatt

SEQ ID NO: 77113 - DNA, 15 bp, Homo sapiens
gtttttggtggattt

SEQ ID NO: 77114 - DNA, 15 bp, Homo sapiens
tttttggtggattta

SEQ ID NO: 77115 - DNA, 15 bp, Homo sapiens
ttttggtggatttag

SEQ ID NO: 77116 - DNA, 15 bp, Homo sapiens
tttggtggatttagg

SEQ ID NO: 77117 - DNA, 15 bp, Homo sapiens
ttggtggatttaggc

SEQ ID NO: 77118 - DNA, 15 bp, Homo sapiens
tggtggatttaggct

SEQ ID NO: 77119 - DNA, 15 bp, Homo sapiens
ggtggatttaggctg

SEQ ID NO: 77120 - DNA, 15 bp, Homo sapiens
gtggatttaggctgt

SEQ ID NO: 77121 - DNA, 15 bp, Homo sapiens
tggatttaggctgtt

SEQ ID NO: 77122 - DNA, 15 bp, Homo sapiens
ggatttaggctgttg

SEQ ID NO: 77123 - DNA, 15 bp, Homo sapiens
gatttaggctgttgc

SEQ ID NO: 77124 - DNA, 15 bp, Homo sapiens
atttaggctgttgct

SEQ ID NO: 77125 - DNA, 15 bp, Homo sapiens
tttaggctgttgctt

SEQ ID NO: 77126 - DNA, 15 bp, Homo sapiens
ttaggctgttgctta

SEQ ID NO: 77127 - DNA, 15 bp, Homo sapiens
taggctgttgcttac

SEQ ID NO: 77128 - DNA, 15 bp, Homo sapiens
aggctgttgcttact

SEQ ID NO: 77129 - DNA, 15 bp, Homo sapiens
ggctgttgcttacta

SEQ ID NO: 77130 - DNA, 15 bp, Homo sapiens
gctgttgcttactaa

SEQ ID NO: 77131 - DNA, 15 bp, Homo sapiens
ctgttgcttactaag

SEQ ID NO: 77132 - DNA, 15 bp, Homo sapiens
tgttgcttactaagc

SEQ ID NO: 77133 - DNA, 15 bp, Homo sapiens
gttgcttactaagca

SEQ ID NO: 77134 - DNA, 15 bp, Homo sapiens
ttgcttactaagcaa

SEQ ID NO: 77135 - DNA, 15 bp, Homo sapiens
tgcttactaagcaaa

SEQ ID NO: 77136 - DNA, 15 bp, Homo sapiens
gcttactaagcaaag

SEQ ID NO: 77137 - DNA, 15 bp, Homo sapiens
cttactaagcaaagc

SEQ ID NO: 77138 - DNA, 15 bp, Homo sapiens
ttactaagcaaagca

SEQ ID NO: 77139 - DNA, 15 bp, Homo sapiens
tactaagcaaagcag

SEQ ID NO: 77140 - DNA, 15 bp, Homo sapiens
actaagcaaagcagg

SEQ ID NO: 77141 - DNA, 15 bp, Homo sapiens
ctaagcaaagcaggc

SEQ ID NO: 77142 - DNA, 15 bp, Homo sapiens
taagcaaagcaggct

SEQ ID NO: 77143 - DNA, 15 bp, Homo sapiens
aagcaaagcaggctt

SEQ ID NO: 77144 - DNA, 15 bp, Homo sapiens
agcaaagcaggcttt

SEQ ID NO: 77145 - DNA, 15 bp, Homo sapiens
gcaaagcaggcttta

SEQ ID NO: 77146 - DNA, 15 bp, Homo sapiens
caaagcaggctttag

SEQ ID NO: 77147 - DNA, 15 bp, Homo sapiens
aaagcaggctttagt

SEQ ID NO: 77148 - DNA, 15 bp, Homo sapiens
aagcaggctttagtt

SEQ ID NO: 77149 - DNA, 15 bp, Homo sapiens
agcaggctttagttg

SEQ ID NO: 77150 - DNA, 15 bp, Homo sapiens
gcaggctttagttga

SEQ ID NO: 77151 - DNA, 15 bp, Homo sapiens
caggctttagttgag

SEQ ID NO: 77152 - DNA, 15 bp, Homo sapiens
aggctttagttgagg

SEQ ID NO: 77153 - DNA, 15 bp, Homo sapiens
ggctttagttgaggt

SEQ ID NO: 77154 - DNA, 15 bp, Homo sapiens
gctttagttgaggtt

SEQ ID NO: 77155 - DNA, 15 bp, Homo sapiens
ctttagttgaggttt

SEQ ID NO: 77156 - DNA, 15 bp, Homo sapiens
tttagttgaggttta

SEQ ID NO: 77157 - DNA, 15 bp, Homo sapiens
ttagttgaggtttat

SEQ ID NO: 77158 - DNA, 15 bp, Homo sapiens
tagttgaggtttatc

SEQ ID NO: 77159 - DNA, 15 bp, Homo sapiens
agttgaggtttatct

SEQ ID NO: 77160 - DNA, 15 bp, Homo sapiens
gttgaggtttatctt

SEQ ID NO: 77161 - DNA, 15 bp, Homo sapiens
ttgaggtttatcttg

SEQ ID NO: 77162 - DNA, 15 bp, Homo sapiens
tgaggtttatcttgc

SEQ ID NO: 77163 - DNA, 15 bp, Homo sapiens
gaggtttatcttgct

SEQ ID NO: 77164 - DNA, 15 bp, Homo sapiens
aggtttatcttgctt

SEQ ID NO: 77165 - DNA, 15 bp, Homo sapiens
ggtttatcttgcttt

SEQ ID NO: 77166 - DNA, 15 bp, Homo sapiens
gtttatcttgcttta

SEQ ID NO: 77167 - DNA, 15 bp, Homo sapiens
tttatcttgctttaa

SEQ ID NO: 77168 - DNA, 15 bp, Homo sapiens
ttatcttgctttaaa

SEQ ID NO: 77169 - DNA, 15 bp, Homo sapiens
tatcttgctttaaac

SEQ ID NO: 77170 - DNA, 15 bp, Homo sapiens
atcttgctttaaaca

SEQ ID NO: 77171 - DNA, 15 bp, Homo sapiens
tcttgctttaaacag

SEQ ID NO: 77172 - DNA, 15 bp, Homo sapiens
cttgctttaaacaga

SEQ ID NO: 77173 - DNA, 15 bp, Homo sapiens
ttgctttaaacagat

SEQ ID NO: 77174 - DNA, 15 bp, Homo sapiens
tgctttaaacagata

SEQ ID NO: 77175 - DNA, 15 bp, Homo sapiens
gctttaaacagatat

SEQ ID NO: 77176 - DNA, 15 bp, Homo sapiens
ctttaaacagatatt

SEQ ID NO: 77177 - DNA, 15 bp, Homo sapiens
tttaaacagatattt

SEQ ID NO: 77178 - DNA, 15 bp, Homo sapiens
ttaaacagatattta

SEQ ID NO: 77179 - DNA, 15 bp, Homo sapiens
taaacagatatttaa

SEQ ID NO: 77180 - DNA, 15 bp, Homo sapiens
aaacagatatttaac

SEQ ID NO: 77181 - DNA, 15 bp, Homo sapiens
aacagatatttaaca

SEQ ID NO: 77182 - DNA, 15 bp, Homo sapiens
acagatatttaacag

SEQ ID NO: 77183 - DNA, 15 bp, Homo sapiens
cagatatttaacaga

SEQ ID NO: 77184 - DNA, 15 bp, Homo sapiens
agatatttaacagat

SEQ ID NO: 77185 - DNA, 15 bp, Homo sapiens
gatatttaacagatt

SEQ ID NO: 77186 - DNA, 15 bp, Homo sapiens
atatttaacagattt

SEQ ID NO: 77187 - DNA, 15 bp, Homo sapiens
tatttaacagatttt

SEQ ID NO: 77188 - DNA, 15 bp, Homo sapiens
atttaacagattttc

SEQ ID NO: 77189 - DNA, 15 bp, Homo sapiens
tttaacagattttcc

SEQ ID NO: 77190 - DNA, 15 bp, Homo sapiens
ttaacagattttcct

SEQ ID NO: 77191 - DNA, 15 bp, Homo sapiens
taacagattttcctg

SEQ ID NO: 77192 - DNA, 15 bp, Homo sapiens
aacagattttcctgg

SEQ ID NO: 77193 - DNA, 15 bp, Homo sapiens
acagattttcctgga

SEQ ID NO: 77194 - DNA, 15 bp, Homo sapiens
cagattttcctggag

SEQ ID NO: 77195 - DNA, 15 bp, Homo sapiens
agattttcctggagg

SEQ ID NO: 77196 - DNA, 15 bp, Homo sapiens
gattttcctggaggt

SEQ ID NO: 77197 - DNA, 15 bp, Homo sapiens
attttcctggaggtt

SEQ ID NO: 77198 - DNA, 15 bp, Homo sapiens
ttttcctggaggttt

SEQ ID NO: 77199 - DNA, 15 bp, Homo sapiens
tttcctggaggtttt

SEQ ID NO: 77200 - DNA, 15 bp, Homo sapiens
ttcctggaggttttt

SEQ ID NO: 77201 - DNA, 15 bp, Homo sapiens
tcctggaggtttttg

SEQ ID NO: 77202 - DNA, 15 bp, Homo sapiens
cctggaggtttttgt

SEQ ID NO: 77203 - DNA, 15 bp, Homo sapiens
ctggaggtttttgtg

SEQ ID NO: 77204 - DNA, 15 bp, Homo sapiens
tggaggtttttgtgt

SEQ ID NO: 77205 - DNA, 15 bp, Homo sapiens
ggaggtttttgtgta

SEQ ID NO: 77206 - DNA, 15 bp, Homo sapiens
gaggtttttgtgtac

SEQ ID NO: 77207 - DNA, 15 bp, Homo sapiens
aggtttttgtgtacc

SEQ ID NO: 77208 - DNA, 15 bp, Homo sapiens
ggtttttgtgtacca

SEQ ID NO: 77209 - DNA, 15 bp, Homo sapiens
gtttttgtgtaccac

SEQ ID NO: 77210 - DNA, 15 bp, Homo sapiens
tttttgtgtaccact

SEQ ID NO: 77211 - DNA, 15 bp, Homo sapiens
ttttgtgtaccactg

SEQ ID NO: 77212 - DNA, 15 bp, Homo sapiens
tttgtgtaccactgg

SEQ ID NO: 77213 - DNA, 15 bp, Homo sapiens
ttgtgtaccactggg

SEQ ID NO: 77214 - DNA, 15 bp, Homo sapiens
tgtgtaccactggga

SEQ ID NO: 77215 - DNA, 15 bp, Homo sapiens
gtgtaccactgggaa

SEQ ID NO: 77216 - DNA, 15 bp, Homo sapiens
tgtaccactgggaaa

SEQ ID NO: 77217 - DNA, 15 bp, Homo sapiens
gtaccactgggaaaa

SEQ ID NO: 77218 - DNA, 15 bp, Homo sapiens
taccactgggaaaat

SEQ ID NO: 77219 - DNA, 15 bp, Homo sapiens
accactgggaaaatg

SEQ ID NO: 77220 - DNA, 15 bp, Homo sapiens
ccactgggaaaatga

SEQ ID NO: 77221 - DNA, 15 bp, Homo sapiens
cactgggaaaatgaa

SEQ ID NO: 77222 - DNA, 15 bp, Homo sapiens
actgggaaaatgaag

SEQ ID NO: 77223 - DNA, 15 bp, Homo sapiens
ctgggaaaatgaagt

SEQ ID NO: 77224 - DNA, 15 bp, Homo sapiens
tgggaaaatgaagtt

SEQ ID NO: 77225 - DNA, 15 bp, Homo sapiens
gggaaaatgaagtta

SEQ ID NO: 77226 - DNA, 15 bp, Homo sapiens
ggaaaatgaagttag

SEQ ID NO: 77227 - DNA, 15 bp, Homo sapiens
gaaaatgaagttagg

SEQ ID NO: 77228 - DNA, 15 bp, Homo sapiens
aaaatgaagttaggc

SEQ ID NO: 77229 - DNA, 15 bp, Homo sapiens
aaatgaagttaggca

SEQ ID NO: 77230 - DNA, 15 bp, Homo sapiens
aatgaagttaggcag

SEQ ID NO: 77231 - DNA, 15 bp, Homo sapiens
atgaagttaggcaga

SEQ ID NO: 77232 - DNA, 15 bp, Homo sapiens
tgaagttaggcagat

SEQ ID NO: 77233 - DNA, 15 bp, Homo sapiens
gaagttaggcagatg

SEQ ID NO: 77234 - DNA, 15 bp, Homo sapiens
aagttaggcagatga

SEQ ID NO: 77235 - DNA, 15 bp, Homo sapiens
agttaggcagatgac

SEQ ID NO: 77236 - DNA, 15 bp, Homo sapiens
gttaggcagatgact

SEQ ID NO: 77237 - DNA, 15 bp, Homo sapiens
ttaggcagatgacta

SEQ ID NO: 77238 - DNA, 15 bp, Homo sapiens
taggcagatgactaa

SEQ ID NO: 77239 - DNA, 15 bp, Homo sapiens
aggcagatgactaag

SEQ ID NO: 77240 - DNA, 15 bp, Homo sapiens
ggcagatgactaagt

SEQ ID NO: 77241 - DNA, 15 bp, Homo sapiens
gcagatgactaagtg

SEQ ID NO: 77242 - DNA, 15 bp, Homo sapiens
cagatgactaagtga

SEQ ID NO: 77243 - DNA, 15 bp, Homo sapiens
agatgactaagtgaa

SEQ ID NO: 77244 - DNA, 15 bp, Homo sapiens
gatgactaagtgaaa

SEQ ID NO: 77245 - DNA, 15 bp, Homo sapiens
atgactaagtgaaag

SEQ ID NO: 77246 - DNA, 15 bp, Homo sapiens
tgactaagtgaaagc

SEQ ID NO: 77247 - DNA, 15 bp, Homo sapiens
gactaagtgaaagct

SEQ ID NO: 77248 - DNA, 15 bp, Homo sapiens
actaagtgaaagctg

SEQ ID NO: 77249 - DNA, 15 bp, Homo sapiens
ctaagtgaaagctgt

SEQ ID NO: 77250 - DNA, 15 bp, Homo sapiens
taagtgaaagctgtc

SEQ ID NO: 77251 - DNA, 15 bp, Homo sapiens
aagtgaaagctgtcc

SEQ ID NO: 77252 - DNA, 15 bp, Homo sapiens
agtgaaagctgtcct

SEQ ID NO: 77253 - DNA, 15 bp, Homo sapiens
gtgaaagctgtcctg

SEQ ID NO: 77254 - DNA, 15 bp, Homo sapiens
tgaaagctgtcctgc

SEQ ID NO: 77255 - DNA, 15 bp, Homo sapiens
gaaagctgtcctgct

SEQ ID NO: 77256 - DNA, 15 bp, Homo sapiens
aaagctgtcctgctg

SEQ ID NO: 77257 - DNA, 15 bp, Homo sapiens
aagctgtcctgctga

SEQ ID NO: 77258 - DNA, 15 bp, Homo sapiens
agctgtcctgctgac

SEQ ID NO: 77259 - DNA, 15 bp, Homo sapiens
gctgtcctgctgact

SEQ ID NO: 77260 - DNA, 15 bp, Homo sapiens
ctgtcctgctgactc

SEQ ID NO: 77261 - DNA, 15 bp, Homo sapiens
tgtcctgctgactcc

SEQ ID NO: 77262 - DNA, 15 bp, Homo sapiens
gtcctgctgactcct

SEQ ID NO: 77263 - DNA, 15 bp, Homo sapiens
tcctgctgactcctt

SEQ ID NO: 77264 - DNA, 15 bp, Homo sapiens
cctgctgactcctta

SEQ ID NO: 77265 - DNA, 15 bp, Homo sapiens
ctgctgactccttat

SEQ ID NO: 77266 - DNA, 15 bp, Homo sapiens
tgctgactccttata

SEQ ID NO: 77267 - DNA, 15 bp, Homo sapiens
gctgactccttataa

SEQ ID NO: 77268 - DNA, 15 bp, Homo sapiens
ctgactccttataat

SEQ ID NO: 77269 - DNA, 15 bp, Homo sapiens
tgactccttataatg

SEQ ID NO: 77270 - DNA, 15 bp, Homo sapiens
gactccttataatga

SEQ ID NO: 77271 - DNA, 15 bp, Homo sapiens
actccttataatgat

SEQ ID NO: 77272 - DNA, 15 bp, Homo sapiens
ctccttataatgata

SEQ ID NO: 77273 - DNA, 15 bp, Homo sapiens
tccttataatgatag

SEQ ID NO: 77274 - DNA, 15 bp, Homo sapiens
ccttataatgatagt

SEQ ID NO: 77275 - DNA, 15 bp, Homo sapiens
cttataatgatagtc

SEQ ID NO: 77276 - DNA, 15 bp, Homo sapiens
ttataatgatagtca

SEQ ID NO: 77277 - DNA, 15 bp, Homo sapiens
tataatgatagtcat

SEQ ID NO: 77278 - DNA, 15 bp, Homo sapiens
ataatgatagtcatt

SEQ ID NO: 77279 - DNA, 15 bp, Homo sapiens
taatgatagtcattg

SEQ ID NO: 77280 - DNA, 15 bp, Homo sapiens
aatgatagtcattgt

SEQ ID NO: 77281 - DNA, 15 bp, Homo sapiens
atgatagtcattgtc

SEQ ID NO: 77282 - DNA, 15 bp, Homo sapiens
tgatagtcattgtct

SEQ ID NO: 77283 - DNA, 15 bp, Homo sapiens
gatagtcattgtcta

SEQ ID NO: 77284 - DNA, 15 bp, Homo sapiens
atagtcattgtctac

SEQ ID NO: 77285 - DNA, 15 bp, Homo sapiens
tagtcattgtctacc

SEQ ID NO: 77286 - DNA, 15 bp, Homo sapiens
agtcattgtctacca

SEQ ID NO: 77287 - DNA, 15 bp, Homo sapiens
gtcattgtctaccag

SEQ ID NO: 77288 - DNA, 15 bp, Homo sapiens
tcattgtctaccaga

SEQ ID NO: 77289 - DNA, 15 bp, Homo sapiens
cattgtctaccagaa

SEQ ID NO: 77290 - DNA, 15 bp, Homo sapiens
attgtctaccagaag

SEQ ID NO: 77291 - DNA, 15 bp, Homo sapiens
ttgtctaccagaaga

SEQ ID NO: 77292 - DNA, 15 bp, Homo sapiens
tgtctaccagaagat

SEQ ID NO: 77293 - DNA, 15 bp, Homo sapiens
gtctaccagaagatc

SEQ ID NO: 77294 - DNA, 15 bp, Homo sapiens
tctaccagaagatct

SEQ ID NO: 77295 - DNA, 15 bp, Homo sapiens
ctaccagaagatctc

SEQ ID NO: 77296 - DNA, 15 bp, Homo sapiens
taccagaagatctct

SEQ ID NO: 77297 - DNA, 15 bp, Homo sapiens
accagaagatctctc

SEQ ID NO: 77298 - DNA, 15 bp, Homo sapiens
ccagaagatctctcc

SEQ ID NO: 77299 - DNA, 15 bp, Homo sapiens
cagaagatctctcct

SEQ ID NO: 77300 - DNA, 15 bp, Homo sapiens
agaagatctctcctg

SEQ ID NO: 77301 - DNA, 15 bp, Homo sapiens
gaagatctctcctgt

SEQ ID NO: 77302 - DNA, 15 bp, Homo sapiens
aagatctctcctgtc

SEQ ID NO: 77303 - DNA, 15 bp, Homo sapiens
agatctctcctgtca

SEQ ID NO: 77304 - DNA, 15 bp, Homo sapiens
gatctctcctgtcac

SEQ ID NO: 77305 - DNA, 15 bp, Homo sapiens
atctctcctgtcaca

SEQ ID NO: 77306 - DNA, 15 bp, Homo sapiens
tctctcctgtcacac

SEQ ID NO: 77307 - DNA, 15 bp, Homo sapiens
ctctcctgtcacacc

SEQ ID NO: 77308 - DNA, 15 bp, Homo sapiens
tctcctgtcacacca

SEQ ID NO: 77309 - DNA, 15 bp, Homo sapiens
ctcctgtcacaccaa

SEQ ID NO: 77310 - DNA, 15 bp, Homo sapiens
tcctgtcacaccaaa

SEQ ID NO: 77311 - DNA, 15 bp, Homo sapiens
cctgtcacaccaaag

SEQ ID NO: 77312 - DNA, 15 bp, Homo sapiens
ctgtcacaccaaagg

SEQ ID NO: 77313 - DNA, 15 bp, Homo sapiens
tgtcacaccaaagga

SEQ ID NO: 77314 - DNA, 15 bp, Homo sapiens
gtcacaccaaaggat

SEQ ID NO: 77315 - DNA, 15 bp, Homo sapiens
tcacaccaaaggata

SEQ ID NO: 77316 - DNA, 15 bp, Homo sapiens
cacaccaaaggataa

SEQ ID NO: 77317 - DNA, 15 bp, Homo sapiens
acaccaaaggataat

SEQ ID NO: 77318 - DNA, 15 bp, Homo sapiens
caccaaaggataatt

SEQ ID NO: 77319 - DNA, 15 bp, Homo sapiens
accaaaggataattg

SEQ ID NO: 77320 - DNA, 15 bp, Homo sapiens
ccaaaggataattga

SEQ ID NO: 77321 - DNA, 15 bp, Homo sapiens
caaaggataattgat

SEQ ID NO: 77322 - DNA, 15 bp, Homo sapiens
aaaggataattgatt

SEQ ID NO: 77323 - DNA, 15 bp, Homo sapiens
aaggataattgatta

SEQ ID NO: 77324 - DNA, 15 bp, Homo sapiens
aggataattgattat

SEQ ID NO: 77325 - DNA, 15 bp, Homo sapiens
ggataattgattata

SEQ ID NO: 77326 - DNA, 15 bp, Homo sapiens
gataattgattatat

SEQ ID NO: 77327 - DNA, 15 bp, Homo sapiens
ataattgattatatc

SEQ ID NO: 77328 - DNA, 15 bp, Homo sapiens
taattgattatatcc

SEQ ID NO: 77329 - DNA, 15 bp, Homo sapiens
aattgattatatcct

SEQ ID NO: 77330 - DNA, 15 bp, Homo sapiens
attgattatatcctg

SEQ ID NO: 77331 - DNA, 15 bp, Homo sapiens
ttgattatatcctgt

SEQ ID NO: 77332 - DNA, 15 bp, Homo sapiens
tgattatatcctgta

SEQ ID NO: 77333 - DNA, 15 bp, Homo sapiens
gattatatcctgtac

SEQ ID NO: 77334 - DNA, 15 bp, Homo sapiens
attatatcctgtacc

SEQ ID NO: 77335 - DNA, 15 bp, Homo sapiens
ttatatcctgtacca

SEQ ID NO: 77336 - DNA, 15 bp, Homo sapiens
tatatcctgtaccat

SEQ ID NO: 77337 - DNA, 15 bp, Homo sapiens
atatcctgtaccata

SEQ ID NO: 77338 - DNA, 15 bp, Homo sapiens
tatcctgtaccatat

SEQ ID NO: 77339 - DNA, 15 bp, Homo sapiens
atcctgtaccatatt

SEQ ID NO: 77340 - DNA, 15 bp, Homo sapiens
tcctgtaccatatta

SEQ ID NO: 77341 - DNA, 15 bp, Homo sapiens
cctgtaccatattat

SEQ ID NO: 77342 - DNA, 15 bp, Homo sapiens
ctgtaccatattatg

SEQ ID NO: 77343 - DNA, 15 bp, Homo sapiens
tgtaccatattatga

SEQ ID NO: 77344 - DNA, 15 bp, Homo sapiens
gtaccatattatgag

SEQ ID NO: 77345 - DNA, 15 bp, Homo sapiens
taccatattatgagt

SEQ ID NO: 77346 - DNA, 15 bp, Homo sapiens
accatattatgagtc

SEQ ID NO: 77347 - DNA, 15 bp, Homo sapiens
ccatattatgagtca

SEQ ID NO: 77348 - DNA, 15 bp, Homo sapiens
catattatgagtcac

SEQ ID NO: 77349 - DNA, 15 bp, Homo sapiens
atattatgagtcacc

SEQ ID NO: 77350 - DNA, 15 bp, Homo sapiens
tattatgagtcacct

SEQ ID NO: 77351 - DNA, 15 bp, Homo sapiens
attatgagtcacctg

SEQ ID NO: 77352 - DNA, 15 bp, Homo sapiens
ttatgagtcacctga

SEQ ID NO: 77353 - DNA, 15 bp, Homo sapiens
tatgagtcacctgat

SEQ ID NO: 77354 - DNA, 15 bp, Homo sapiens
atgagtcacctgatt

SEQ ID NO: 77355 - DNA, 15 bp, Homo sapiens
tgagtcacctgattg

SEQ ID NO: 77356 - DNA, 15 bp, Homo sapiens
gagtcacctgattgg

SEQ ID NO: 77357 - DNA, 15 bp, Homo sapiens
agtcacctgattgga

SEQ ID NO: 77358 - DNA, 15 bp, Homo sapiens
gtcacctgattggag

SEQ ID NO: 77359 - DNA, 15 bp, Homo sapiens
tcacctgattggaga

SEQ ID NO: 77360 - DNA, 15 bp, Homo sapiens
cacctgattggagat

SEQ ID NO: 77361 - DNA, 15 bp, Homo sapiens
acctgattggagata

SEQ ID NO: 77362 - DNA, 15 bp, Homo sapiens
cctgattggagatat

SEQ ID NO: 77363 - DNA, 15 bp, Homo sapiens
ctgattggagatata

SEQ ID NO: 77364 - DNA, 15 bp, Homo sapiens
tgattggagatataa

SEQ ID NO: 77365 - DNA, 15 bp, Homo sapiens
gattggagatataag

SEQ ID NO: 77366 - DNA, 15 bp, Homo sapiens
attggagatataaga

SEQ ID NO: 77367 - DNA, 15 bp, Homo sapiens
ttggagatataagac

SEQ ID NO: 77368 - DNA, 15 bp, Homo sapiens
tggagatataagaca

SEQ ID NO: 77369 - DNA, 15 bp, Homo sapiens
ggagatataagacat

SEQ ID NO: 77370 - DNA, 15 bp, Homo sapiens
gagatataagacata

SEQ ID NO: 77371 - DNA, 15 bp, Homo sapiens
agatataagacatac

SEQ ID NO: 77372 - DNA, 15 bp, Homo sapiens
gatataagacatact

SEQ ID NO: 77373 - DNA, 15 bp, Homo sapiens
atataagacatactt

SEQ ID NO: 77374 - DNA, 15 bp, Homo sapiens
tataagacatacttc

SEQ ID NO: 77375 - DNA, 15 bp, Homo sapiens
ataagacatacttct

SEQ ID NO: 77376 - DNA, 15 bp, Homo sapiens
taagacatacttctc

SEQ ID NO: 77377 - DNA, 15 bp, Homo sapiens
aagacatacttctca

SEQ ID NO: 77378 - DNA, 15 bp, Homo sapiens
agacatacttctcac

SEQ ID NO: 77379 - DNA, 15 bp, Homo sapiens
gacatacttctcaca

SEQ ID NO: 77380 - DNA, 15 bp, Homo sapiens
acatacttctcacat

SEQ ID NO: 77381 - DNA, 15 bp, Homo sapiens
catacttctcacata

SEQ ID NO: 77382 - DNA, 15 bp, Homo sapiens
atacttctcacatat

SEQ ID NO: 77383 - DNA, 15 bp, Homo sapiens
tacttctcacatatt

SEQ ID NO: 77384 - DNA, 15 bp, Homo sapiens
acttctcacatattt

SEQ ID NO: 77385 - DNA, 15 bp, Homo sapiens
cttctcacatattta

SEQ ID NO: 77386 - DNA, 15 bp, Homo sapiens
ttctcacatatttag

SEQ ID NO: 77387 - DNA, 15 bp, Homo sapiens
tctcacatatttaga

SEQ ID NO: 77388 - DNA, 15 bp, Homo sapiens
ctcacatatttagat

SEQ ID NO: 77389 - DNA, 15 bp, Homo sapiens
tcacatatttagatg

SEQ ID NO: 77390 - DNA, 15 bp, Homo sapiens
cacatatttagatga

SEQ ID NO: 77391 - DNA, 15 bp, Homo sapiens
acatatttagatgac

SEQ ID NO: 77392 - DNA, 15 bp, Homo sapiens
catatttagatgaca

SEQ ID NO: 77393 - DNA, 15 bp, Homo sapiens
atatttagatgacac

SEQ ID NO: 77394 - DNA, 15 bp, Homo sapiens
tatttagatgacaca

SEQ ID NO: 77395 - DNA, 15 bp, Homo sapiens
atttagatgacacag

SEQ ID NO: 77396 - DNA, 15 bp, Homo sapiens
tttagatgacacagg

SEQ ID NO: 77397 - DNA, 15 bp, Homo sapiens
ttagatgacacaggt

SEQ ID NO: 77398 - DNA, 15 bp, Homo sapiens
tagatgacacaggtt

SEQ ID NO: 77399 - DNA, 15 bp, Homo sapiens
agatgacacaggtta

SEQ ID NO: 77400 - DNA, 15 bp, Homo sapiens
gatgacacaggttag

SEQ ID NO: 77401 - DNA, 15 bp, Homo sapiens
atgacacaggttagt

SEQ ID NO: 77402 - DNA, 15 bp, Homo sapiens
tgacacaggttagta

SEQ ID NO: 77403 - DNA, 15 bp, Homo sapiens
gacacaggttagtac

SEQ ID NO: 77404 - DNA, 15 bp, Homo sapiens
acacaggttagtaca

SEQ ID NO: 77405 - DNA, 15 bp, Homo sapiens
cacaggttagtacat

SEQ ID NO: 77406 - DNA, 15 bp, Homo sapiens
acaggttagtacatt

SEQ ID NO: 77407 - DNA, 15 bp, Homo sapiens
caggttagtacattg

SEQ ID NO: 77408 - DNA, 15 bp, Homo sapiens
aggttagtacattga

SEQ ID NO: 77409 - DNA, 15 bp, Homo sapiens
ggttagtacattgaa

SEQ ID NO: 77410 - DNA, 15 bp, Homo sapiens
gttagtacattgaat

SEQ ID NO: 77411 - DNA, 15 bp, Homo sapiens
ttagtacattgaata

SEQ ID NO: 77412 - DNA, 15 bp, Homo sapiens
tagtacattgaatat

SEQ ID NO: 77413 - DNA, 15 bp, Homo sapiens
agtacattgaatatc

SEQ ID NO: 77414 - DNA, 15 bp, Homo sapiens
gtacattgaatatca

SEQ ID NO: 77415 - DNA, 15 bp, Homo sapiens
tacattgaatatcag

SEQ ID NO: 77416 - DNA, 15 bp, Homo sapiens
acattgaatatcagc

SEQ ID NO: 77417 - DNA, 15 bp, Homo sapiens
cattgaatatcagcc

SEQ ID NO: 77418 - DNA, 15 bp, Homo sapiens
attgaatatcagcca

SEQ ID NO: 77419 - DNA, 15 bp, Homo sapiens
ttgaatatcagccag

SEQ ID NO: 77420 - DNA, 15 bp, Homo sapiens
tgaatatcagccagg

SEQ ID NO: 77421 - DNA, 15 bp, Homo sapiens
gaatatcagccaggg

SEQ ID NO: 77422 - DNA, 15 bp, Homo sapiens
aatatcagccagggt

SEQ ID NO: 77423 - DNA, 15 bp, Homo sapiens
atatcagccagggtt

SEQ ID NO: 77424 - DNA, 15 bp, Homo sapiens
tatcagccagggttt

SEQ ID NO: 77425 - DNA, 15 bp, Homo sapiens
atcagccagggtttt

SEQ ID NO: 77426 - DNA, 15 bp, Homo sapiens
tcagccagggttttt

SEQ ID NO: 77427 - DNA, 15 bp, Homo sapiens
cagccagggttttta

SEQ ID NO: 77428 - DNA, 15 bp, Homo sapiens
agccagggtttttaa

SEQ ID NO: 77429 - DNA, 15 bp, Homo sapiens
gccagggtttttaag

SEQ ID NO: 77430 - DNA, 15 bp, Homo sapiens
ccagggtttttaagg

SEQ ID NO: 77431 - DNA, 15 bp, Homo sapiens
cagggtttttaagga

SEQ ID NO: 77432 - DNA, 15 bp, Homo sapiens
agggtttttaaggat

SEQ ID NO: 77433 - DNA, 15 bp, Homo sapiens
gggtttttaaggatc

SEQ ID NO: 77434 - DNA, 15 bp, Homo sapiens
ggtttttaaggatct

SEQ ID NO: 77435 - DNA, 15 bp, Homo sapiens
gtttttaaggatctt

SEQ ID NO: 77436 - DNA, 15 bp, Homo sapiens
tttttaaggatctta

SEQ ID NO: 77437 - DNA, 15 bp, Homo sapiens
ttttaaggatcttaa

SEQ ID NO: 77438 - DNA, 15 bp, Homo sapiens
tttaaggatcttaat

SEQ ID NO: 77439 - DNA, 15 bp, Homo sapiens
ttaaggatcttaata

SEQ ID NO: 77440 - DNA, 15 bp, Homo sapiens
taaggatcttaatag

SEQ ID NO: 77441 - DNA, 15 bp, Homo sapiens
aaggatcttaataga

SEQ ID NO: 77442 - DNA, 15 bp, Homo sapiens
aggatcttaatagag

SEQ ID NO: 77443 - DNA, 15 bp, Homo sapiens
ggatcttaatagagt

SEQ ID NO: 77444 - DNA, 15 bp, Homo sapiens
gatcttaatagagtg

SEQ ID NO: 77445 - DNA, 15 bp, Homo sapiens
atcttaatagagtgg

SEQ ID NO: 77446 - DNA, 15 bp, Homo sapiens
tcttaatagagtgga

SEQ ID NO: 77447 - DNA, 15 bp, Homo sapiens
cttaatagagtggaa

SEQ ID NO: 77448 - DNA, 15 bp, Homo sapiens
ttaatagagtggaac

SEQ ID NO: 77449 - DNA, 15 bp, Homo sapiens
taatagagtggaact

SEQ ID NO: 77450 - DNA, 15 bp, Homo sapiens
aatagagtggaacta

SEQ ID NO: 77451 - DNA, 15 bp, Homo sapiens
atagagtggaactaa

SEQ ID NO: 77452 - DNA, 15 bp, Homo sapiens
tagagtggaactaag

SEQ ID NO: 77453 - DNA, 15 bp, Homo sapiens
agagtggaactaagg

SEQ ID NO: 77454 - DNA, 15 bp, Homo sapiens
gagtggaactaaggt

SEQ ID NO: 77455 - DNA, 15 bp, Homo sapiens
agtggaactaaggta

SEQ ID NO: 77456 - DNA, 15 bp, Homo sapiens
gtggaactaaggtag

SEQ ID NO: 77457 - DNA, 15 bp, Homo sapiens
tggaactaaggtaga

SEQ ID NO: 77458 - DNA, 15 bp, Homo sapiens
ggaactaaggtagaa

SEQ ID NO: 77459 - DNA, 15 bp, Homo sapiens
gaactaaggtagaaa

SEQ ID NO: 77460 - DNA, 15 bp, Homo sapiens
aactaaggtagaaac

SEQ ID NO: 77461 - DNA, 15 bp, Homo sapiens
actaaggtagaaact

SEQ ID NO: 77462 - DNA, 15 bp, Homo sapiens
ctaaggtagaaacta

SEQ ID NO: 77463 - DNA, 15 bp, Homo sapiens
taaggtagaaactat

SEQ ID NO: 77464 - DNA, 15 bp, Homo sapiens
aaggtagaaactatt

SEQ ID NO: 77465 - DNA, 15 bp, Homo sapiens
aggtagaaactatta

SEQ ID NO: 77466 - DNA, 15 bp, Homo sapiens
ggtagaaactattaa

SEQ ID NO: 77467 - DNA, 15 bp, Homo sapiens
gtagaaactattaag

SEQ ID NO: 77468 - DNA, 15 bp, Homo sapiens
tagaaactattaaga

SEQ ID NO: 77469 - DNA, 15 bp, Homo sapiens
agaaactattaagag

SEQ ID NO: 77470 - DNA, 15 bp, Homo sapiens
gaaactattaagagc

SEQ ID NO: 77471 - DNA, 15 bp, Homo sapiens
aaactattaagagca

SEQ ID NO: 77472 - DNA, 15 bp, Homo sapiens
aactattaagagcaa

SEQ ID NO: 77473 - DNA, 15 bp, Homo sapiens
actattaagagcaat

SEQ ID NO: 77474 - DNA, 15 bp, Homo sapiens
ctattaagagcaatt

SEQ ID NO: 77475 - DNA, 15 bp, Homo sapiens
tattaagagcaatta

SEQ ID NO: 77476 - DNA, 15 bp, Homo sapiens
attaagagcaattaa

SEQ ID NO: 77477 - DNA, 15 bp, Homo sapiens
ttaagagcaattaat

SEQ ID NO: 77478 - DNA, 15 bp, Homo sapiens
taagagcaattaata

SEQ ID NO: 77479 - DNA, 15 bp, Homo sapiens
aagagcaattaatag

SEQ ID NO: 77480 - DNA, 15 bp, Homo sapiens
agagcaattaatagt

SEQ ID NO: 77481 - DNA, 15 bp, Homo sapiens
gagcaattaatagtg

SEQ ID NO: 77482 - DNA, 15 bp, Homo sapiens
agcaattaatagtga

SEQ ID NO: 77483 - DNA, 15 bp, Homo sapiens
gcaattaatagtgat

SEQ ID NO: 77484 - DNA, 15 bp, Homo sapiens
caattaatagtgata

SEQ ID NO: 77485 - DNA, 15 bp, Homo sapiens
aattaatagtgatat

SEQ ID NO: 77486 - DNA, 15 bp, Homo sapiens
attaatagtgatata

SEQ ID NO: 77487 - DNA, 15 bp, Homo sapiens
ttaatagtgatatat

SEQ ID NO: 77488 - DNA, 15 bp, Homo sapiens
taatagtgatatatc

SEQ ID NO: 77489 - DNA, 15 bp, Homo sapiens
aatagtgatatatct

SEQ ID NO: 77490 - DNA, 15 bp, Homo sapiens
atagtgatatatcta

SEQ ID NO: 77491 - DNA, 15 bp, Homo sapiens
tagtgatatatctat

SEQ ID NO: 77492 - DNA, 15 bp, Homo sapiens
agtgatatatctata

SEQ ID NO: 77493 - DNA, 15 bp, Homo sapiens
gtgatatatctatag

SEQ ID NO: 77494 - DNA, 15 bp, Homo sapiens
tgatatatctatagt

SEQ ID NO: 77495 - DNA, 15 bp, Homo sapiens
gatatatctatagtc

SEQ ID NO: 77496 - DNA, 15 bp, Homo sapiens
atatatctatagtcc

SEQ ID NO: 77497 - DNA, 15 bp, Homo sapiens
tatatctatagtcct

SEQ ID NO: 77498 - DNA, 15 bp, Homo sapiens
atatctatagtcctg

SEQ ID NO: 77499 - DNA, 15 bp, Homo sapiens
tatctatagtcctgt

SEQ ID NO: 77500 - DNA, 15 bp, Homo sapiens
atctatagtcctgtt

SEQ ID NO: 77501 - DNA, 15 bp, Homo sapiens
tctatagtcctgttt

SEQ ID NO: 77502 - DNA, 15 bp, Homo sapiens
ctatagtcctgtttc

SEQ ID NO: 77503 - DNA, 15 bp, Homo sapiens
tatagtcctgtttct

SEQ ID NO: 77504 - DNA, 15 bp, Homo sapiens
atagtcctgtttcta

SEQ ID NO: 77505 - DNA, 15 bp, Homo sapiens
tagtcctgtttctaa

SEQ ID NO: 77506 - DNA, 15 bp, Homo sapiens
agtcctgtttctaaa

SEQ ID NO: 77507 - DNA, 15 bp, Homo sapiens
gtcctgtttctaaac

SEQ ID NO: 77508 - DNA, 15 bp, Homo sapiens
tcctgtttctaaaca

SEQ ID NO: 77509 - DNA, 15 bp, Homo sapiens
cctgtttctaaacaa

SEQ ID NO: 77510 - DNA, 15 bp, Homo sapiens
ctgtttctaaacaag

SEQ ID NO: 77511 - DNA, 15 bp, Homo sapiens
tgtttctaaacaagt

SEQ ID NO: 77512 - DNA, 15 bp, Homo sapiens
gtttctaaacaagtt

SEQ ID NO: 77513 - DNA, 15 bp, Homo sapiens
tttctaaacaagttt

SEQ ID NO: 77514 - DNA, 15 bp, Homo sapiens
ttctaaacaagtttt

SEQ ID NO: 77515 - DNA, 15 bp, Homo sapiens
tctaaacaagttttt

SEQ ID NO: 77516 - DNA, 15 bp, Homo sapiens
ctaaacaagtttttt

SEQ ID NO: 77517 - DNA, 15 bp, Homo sapiens
taaacaagttttttt

SEQ ID NO: 77518 - DNA, 15 bp, Homo sapiens
aaacaagttttttta

SEQ ID NO: 77519 - DNA, 15 bp, Homo sapiens
aacaagtttttttaa

SEQ ID NO: 77520 - DNA, 15 bp, Homo sapiens
acaagtttttttaaa

SEQ ID NO: 77521 - DNA, 15 bp, Homo sapiens
caagtttttttaaaa

SEQ ID NO: 77522 - DNA, 15 bp, Homo sapiens
aagtttttttaaaaa

SEQ ID NO: 77523 - DNA, 15 bp, Homo sapiens
agtttttttaaaaac

SEQ ID NO: 77524 - DNA, 15 bp, Homo sapiens
gtttttttaaaaacc

SEQ ID NO: 77525 - DNA, 15 bp, Homo sapiens
tttttttaaaaacct

SEQ ID NO: 77526 - DNA, 15 bp, Homo sapiens
ttttttaaaaacctc

SEQ ID NO: 77527 - DNA, 15 bp, Homo sapiens
tttttaaaaacctca

SEQ ID NO: 77528 - DNA, 15 bp, Homo sapiens
ttttaaaaacctcaa

SEQ ID NO: 77529 - DNA, 15 bp, Homo sapiens
tttaaaaacctcaac

SEQ ID NO: 77530 - DNA, 15 bp, Homo sapiens
ttaaaaacctcaact

SEQ ID NO: 77531 - DNA, 15 bp, Homo sapiens
taaaaacctcaactc

SEQ ID NO: 77532 - DNA, 15 bp, Homo sapiens
aaaaacctcaactct

SEQ ID NO: 77533 - DNA, 15 bp, Homo sapiens
aaaacctcaactctg

SEQ ID NO: 77534 - DNA, 15 bp, Homo sapiens
aaacctcaactctga

SEQ ID NO: 77535 - DNA, 15 bp, Homo sapiens
aacctcaactctgac

SEQ ID NO: 77536 - DNA, 15 bp, Homo sapiens
acctcaactctgact

SEQ ID NO: 77537 - DNA, 15 bp, Homo sapiens
cctcaactctgacta

SEQ ID NO: 77538 - DNA, 15 bp, Homo sapiens
ctcaactctgactat

SEQ ID NO: 77539 - DNA, 15 bp, Homo sapiens
tcaactctgactata

SEQ ID NO: 77540 - DNA, 15 bp, Homo sapiens
caactctgactatag

SEQ ID NO: 77541 - DNA, 15 bp, Homo sapiens
aactctgactatagt

SEQ ID NO: 77542 - DNA, 15 bp, Homo sapiens
actctgactatagtg

SEQ ID NO: 77543 - DNA, 15 bp, Homo sapiens
ctctgactatagtga

SEQ ID NO: 77544 - DNA, 15 bp, Homo sapiens
tctgactatagtgaa

SEQ ID NO: 77545 - DNA, 15 bp, Homo sapiens
ctgactatagtgaac

SEQ ID NO: 77546 - DNA, 15 bp, Homo sapiens
tgactatagtgaaca

SEQ ID NO: 77547 - DNA, 15 bp, Homo sapiens
gactatagtgaacag

SEQ ID NO: 77548 - DNA, 15 bp, Homo sapiens
actatagtgaacaga

SEQ ID NO: 77549 - DNA, 15 bp, Homo sapiens
ctatagtgaacagag

SEQ ID NO: 77550 - DNA, 15 bp, Homo sapiens
tatagtgaacagaga

SEQ ID NO: 77551 - DNA, 15 bp, Homo sapiens
atagtgaacagagaa

SEQ ID NO: 77552 - DNA, 15 bp, Homo sapiens
tagtgaacagagaag

SEQ ID NO: 77553 - DNA, 15 bp, Homo sapiens
agtgaacagagaagt

SEQ ID NO: 77554 - DNA, 15 bp, Homo sapiens
gtgaacagagaagtc

SEQ ID NO: 77555 - DNA, 15 bp, Homo sapiens
tgaacagagaagtct

SEQ ID NO: 77556 - DNA, 15 bp, Homo sapiens
gaacagagaagtctt

SEQ ID NO: 77557 - DNA, 15 bp, Homo sapiens
aacagagaagtcttg

SEQ ID NO: 77558 - DNA, 15 bp, Homo sapiens
acagagaagtcttgg

SEQ ID NO: 77559 - DNA, 15 bp, Homo sapiens
cagagaagtcttgga

SEQ ID NO: 77560 - DNA, 15 bp, Homo sapiens
agagaagtcttggac

SEQ ID NO: 77561 - DNA, 15 bp, Homo sapiens
gagaagtcttggact

SEQ ID NO: 77562 - DNA, 15 bp, Homo sapiens
agaagtcttggactc

SEQ ID NO: 77563 - DNA, 15 bp, Homo sapiens
gaagtcttggactct

SEQ ID NO: 77564 - DNA, 15 bp, Homo sapiens
aagtcttggactctt

SEQ ID NO: 77565 - DNA, 15 bp, Homo sapiens
agtcttggactctta

SEQ ID NO: 77566 - DNA, 15 bp, Homo sapiens
gtcttggactcttac

SEQ ID NO: 77567 - DNA, 15 bp, Homo sapiens
tcttggactcttaca

SEQ ID NO: 77568 - DNA, 15 bp, Homo sapiens
cttggactcttacaa

SEQ ID NO: 77569 - DNA, 15 bp, Homo sapiens
ttggactcttacaat

SEQ ID NO: 77570 - DNA, 15 bp, Homo sapiens
tggactcttacaatt

SEQ ID NO: 77571 - DNA, 15 bp, Homo sapiens
ggactcttacaattc

SEQ ID NO: 77572 - DNA, 15 bp, Homo sapiens
gactcttacaattca

SEQ ID NO: 77573 - DNA, 15 bp, Homo sapiens
actcttacaattcat

SEQ ID NO: 77574 - DNA, 15 bp, Homo sapiens
ctcttacaattcatg

SEQ ID NO: 77575 - DNA, 15 bp, Homo sapiens
tcttacaattcatgt

SEQ ID NO: 77576 - DNA, 15 bp, Homo sapiens
cttacaattcatgtg

SEQ ID NO: 77577 - DNA, 15 bp, Homo sapiens
ttacaattcatgtga

SEQ ID NO: 77578 - DNA, 15 bp, Homo sapiens
tacaattcatgtgag

SEQ ID NO: 77579 - DNA, 15 bp, Homo sapiens
acaattcatgtgaga

SEQ ID NO: 77580 - DNA, 15 bp, Homo sapiens
caattcatgtgagaa

SEQ ID NO: 77581 - DNA, 15 bp, Homo sapiens
aattcatgtgagaag

SEQ ID NO: 77582 - DNA, 15 bp, Homo sapiens
attcatgtgagaaga

SEQ ID NO: 77583 - DNA, 15 bp, Homo sapiens
ttcatgtgagaagac

SEQ ID NO: 77584 - DNA, 15 bp, Homo sapiens
tcatgtgagaagacc

SEQ ID NO: 77585 - DNA, 15 bp, Homo sapiens
catgtgagaagacct

SEQ ID NO: 77586 - DNA, 15 bp, Homo sapiens
atgtgagaagacctg

SEQ ID NO: 77587 - DNA, 15 bp, Homo sapiens
tgtgagaagacctga

SEQ ID NO: 77588 - DNA, 15 bp, Homo sapiens
gtgagaagacctgaa

SEQ ID NO: 77589 - DNA, 15 bp, Homo sapiens
tgagaagacctgaaa

SEQ ID NO: 77590 - DNA, 15 bp, Homo sapiens
gagaagacctgaaac

SEQ ID NO: 77591 - DNA, 15 bp, Homo sapiens
agaagacctgaaact

SEQ ID NO: 77592 - DNA, 15 bp, Homo sapiens
gaagacctgaaactt

SEQ ID NO: 77593 - DNA, 15 bp, Homo sapiens
aagacctgaaacttt

SEQ ID NO: 77594 - DNA, 15 bp, Homo sapiens
agacctgaaactttg

SEQ ID NO: 77595 - DNA, 15 bp, Homo sapiens
gacctgaaactttga

SEQ ID NO: 77596 - DNA, 15 bp, Homo sapiens
acctgaaactttgat

SEQ ID NO: 77597 - DNA, 15 bp, Homo sapiens
cctgaaactttgata

SEQ ID NO: 77598 - DNA, 15 bp, Homo sapiens
ctgaaactttgataa

SEQ ID NO: 77599 - DNA, 15 bp, Homo sapiens
tgaaactttgataac

SEQ ID NO: 77600 - DNA, 15 bp, Homo sapiens
gaaactttgataaca

SEQ ID NO: 77601 - DNA, 15 bp, Homo sapiens
aaactttgataacaa

SEQ ID NO: 77602 - DNA, 15 bp, Homo sapiens
aactttgataacaat

SEQ ID NO: 77603 - DNA, 15 bp, Homo sapiens
actttgataacaatt

SEQ ID NO: 77604 - DNA, 15 bp, Homo sapiens
ctttgataacaatta

SEQ ID NO: 77605 - DNA, 15 bp, Homo sapiens
tttgataacaattat

SEQ ID NO: 77606 - DNA, 15 bp, Homo sapiens
ttgataacaattata

SEQ ID NO: 77607 - DNA, 15 bp, Homo sapiens
tgataacaattatat

SEQ ID NO: 77608 - DNA, 15 bp, Homo sapiens
gataacaattatata

SEQ ID NO: 77609 - DNA, 15 bp, Homo sapiens
ataacaattatatac

SEQ ID NO: 77610 - DNA, 15 bp, Homo sapiens
taacaattatataca

SEQ ID NO: 77611 - DNA, 15 bp, Homo sapiens
aacaattatatacat

SEQ ID NO: 77612 - DNA, 15 bp, Homo sapiens
acaattatatacatt

SEQ ID NO: 77613 - DNA, 15 bp, Homo sapiens
caattatatacattt

SEQ ID NO: 77614 - DNA, 15 bp, Homo sapiens
aattatatacatttt

SEQ ID NO: 77615 - DNA, 15 bp, Homo sapiens
attatatacattttg

SEQ ID NO: 77616 - DNA, 15 bp, Homo sapiens
ttatatacattttgt

SEQ ID NO: 77617 - DNA, 15 bp, Homo sapiens
tatatacattttgtg

SEQ ID NO: 77618 - DNA, 15 bp, Homo sapiens
atatacattttgtga

SEQ ID NO: 77619 - DNA, 15 bp, Homo sapiens
tatacattttgtgag

SEQ ID NO: 77620 - DNA, 15 bp, Homo sapiens
atacattttgtgagt

SEQ ID NO: 77621 - DNA, 15 bp, Homo sapiens
tacattttgtgagta

SEQ ID NO: 77622 - DNA, 15 bp, Homo sapiens
acattttgtgagtaa

SEQ ID NO: 77623 - DNA, 15 bp, Homo sapiens
cattttgtgagtaat

SEQ ID NO: 77624 - DNA, 15 bp, Homo sapiens
attttgtgagtaatt

SEQ ID NO: 77625 - DNA, 15 bp, Homo sapiens
ttttgtgagtaattt

SEQ ID NO: 77626 - DNA, 15 bp, Homo sapiens
tttgtgagtaatttc

SEQ ID NO: 77627 - DNA, 15 bp, Homo sapiens
ttgtgagtaatttct

SEQ ID NO: 77628 - DNA, 15 bp, Homo sapiens
tgtgagtaatttctt

SEQ ID NO: 77629 - DNA, 15 bp, Homo sapiens
gtgagtaatttcttt

SEQ ID NO: 77630 - DNA, 15 bp, Homo sapiens
tgagtaatttctttg

SEQ ID NO: 77631 - DNA, 15 bp, Homo sapiens
gagtaatttctttgg

SEQ ID NO: 77632 - DNA, 15 bp, Homo sapiens
agtaatttctttggt

SEQ ID NO: 77633 - DNA, 15 bp, Homo sapiens
gtaatttctttggtg

SEQ ID NO: 77634 - DNA, 15 bp, Homo sapiens
taatttctttggtgt

SEQ ID NO: 77635 - DNA, 15 bp, Homo sapiens
aatttctttggtgta

SEQ ID NO: 77636 - DNA, 15 bp, Homo sapiens
atttctttggtgtat

SEQ ID NO: 77637 - DNA, 15 bp, Homo sapiens
tttctttggtgtatg

SEQ ID NO: 77638 - DNA, 15 bp, Homo sapiens
ttctttggtgtatgc

SEQ ID NO: 77639 - DNA, 15 bp, Homo sapiens
tctttggtgtatgcc

SEQ ID NO: 77640 - DNA, 15 bp, Homo sapiens
ctttggtgtatgcct

SEQ ID NO: 77641 - DNA, 15 bp, Homo sapiens
tttggtgtatgcctt

SEQ ID NO: 77642 - DNA, 15 bp, Homo sapiens
ttggtgtatgccttc

SEQ ID NO: 77643 - DNA, 15 bp, Homo sapiens
tggtgtatgccttca

SEQ ID NO: 77644 - DNA, 15 bp, Homo sapiens
ggtgtatgccttcac

SEQ ID NO: 77645 - DNA, 15 bp, Homo sapiens
gtgtatgccttcaca

SEQ ID NO: 77646 - DNA, 15 bp, Homo sapiens
tgtatgccttcacat

SEQ ID NO: 77647 - DNA, 15 bp, Homo sapiens
gtatgccttcacata

SEQ ID NO: 77648 - DNA, 15 bp, Homo sapiens
tatgccttcacatat

SEQ ID NO: 77649 - DNA, 15 bp, Homo sapiens
atgccttcacatatc

SEQ ID NO: 77650 - DNA, 15 bp, Homo sapiens
tgccttcacatatct

SEQ ID NO: 77651 - DNA, 15 bp, Homo sapiens
gccttcacatatctc

SEQ ID NO: 77652 - DNA, 15 bp, Homo sapiens
ccttcacatatctct

SEQ ID NO: 77653 - DNA, 15 bp, Homo sapiens
cttcacatatctctg

SEQ ID NO: 77654 - DNA, 15 bp, Homo sapiens
ttcacatatctctgg

SEQ ID NO: 77655 - DNA, 15 bp, Homo sapiens
tcacatatctctggt

SEQ ID NO: 77656 - DNA, 15 bp, Homo sapiens
cacatatctctggta

SEQ ID NO: 77657 - DNA, 15 bp, Homo sapiens
acatatctctggtat

SEQ ID NO: 77658 - DNA, 15 bp, Homo sapiens
catatctctggtatg

SEQ ID NO: 77659 - DNA, 15 bp, Homo sapiens
atatctctggtatgt

SEQ ID NO: 77660 - DNA, 15 bp, Homo sapiens
tatctctggtatgtg

SEQ ID NO: 77661 - DNA, 15 bp, Homo sapiens
atctctggtatgtga

SEQ ID NO: 77662 - DNA, 15 bp, Homo sapiens
tctctggtatgtgac

SEQ ID NO: 77663 - DNA, 15 bp, Homo sapiens
ctctggtatgtgacc

SEQ ID NO: 77664 - DNA, 15 bp, Homo sapiens
tctggtatgtgacct

SEQ ID NO: 77665 - DNA, 15 bp, Homo sapiens
ctggtatgtgaccta

SEQ ID NO: 77666 - DNA, 15 bp, Homo sapiens
tggtatgtgacctat

SEQ ID NO: 77667 - DNA, 15 bp, Homo sapiens
ggtatgtgacctatg

SEQ ID NO: 77668 - DNA, 15 bp, Homo sapiens
gtatgtgacctatgc

SEQ ID NO: 77669 - DNA, 15 bp, Homo sapiens
tatgtgacctatgct

SEQ ID NO: 77670 - DNA, 15 bp, Homo sapiens
atgtgacctatgctg

SEQ ID NO: 77671 - DNA, 15 bp, Homo sapiens
tgtgacctatgctgc

SEQ ID NO: 77672 - DNA, 15 bp, Homo sapiens
gtgacctatgctgca

SEQ ID NO: 77673 - DNA, 15 bp, Homo sapiens
tgacctatgctgcag

SEQ ID NO: 77674 - DNA, 15 bp, Homo sapiens
gacctatgctgcagt

SEQ ID NO: 77675 - DNA, 15 bp, Homo sapiens
acctatgctgcagtc

SEQ ID NO: 77676 - DNA, 15 bp, Homo sapiens
cctatgctgcagtcc

SEQ ID NO: 77677 - DNA, 15 bp, Homo sapiens
ctatgctgcagtcca

SEQ ID NO: 77678 - DNA, 15 bp, Homo sapiens
tatgctgcagtccat

SEQ ID NO: 77679 - DNA, 15 bp, Homo sapiens
atgctgcagtccatt

SEQ ID NO: 77680 - DNA, 15 bp, Homo sapiens
tgctgcagtccattg

SEQ ID NO: 77681 - DNA, 15 bp, Homo sapiens
gctgcagtccattga

SEQ ID NO: 77682 - DNA, 15 bp, Homo sapiens
ctgcagtccattgag

SEQ ID NO: 77683 - DNA, 15 bp, Homo sapiens
tgcagtccattgagc

SEQ ID NO: 77684 - DNA, 15 bp, Homo sapiens
gcagtccattgagca

SEQ ID NO: 77685 - DNA, 15 bp, Homo sapiens
cagtccattgagcat

SEQ ID NO: 77686 - DNA, 15 bp, Homo sapiens
agtccattgagcata

SEQ ID NO: 77687 - DNA, 15 bp, Homo sapiens
gtccattgagcatag

SEQ ID NO: 77688 - DNA, 15 bp, Homo sapiens
tccattgagcataga

SEQ ID NO: 77689 - DNA, 15 bp, Homo sapiens
ccattgagcatagat

SEQ ID NO: 77690 - DNA, 15 bp, Homo sapiens
cattgagcatagatt

SEQ ID NO: 77691 - DNA, 15 bp, Homo sapiens
attgagcatagattc

SEQ ID NO: 77692 - DNA, 15 bp, Homo sapiens
ttgagcatagattcc

SEQ ID NO: 77693 - DNA, 15 bp, Homo sapiens
tgagcatagattccc

SEQ ID NO: 77694 - DNA, 15 bp, Homo sapiens
gagcatagattccca

SEQ ID NO: 77695 - DNA, 15 bp, Homo sapiens
agcatagattcccag

SEQ ID NO: 77696 - DNA, 15 bp, Homo sapiens
gcatagattcccaga

SEQ ID NO: 77697 - DNA, 15 bp, Homo sapiens
catagattcccagaa

SEQ ID NO: 77698 - DNA, 15 bp, Homo sapiens
atagattcccagaat

SEQ ID NO: 77699 - DNA, 15 bp, Homo sapiens
tagattcccagaatg

SEQ ID NO: 77700 - DNA, 15 bp, Homo sapiens
agattcccagaatgt

SEQ ID NO: 77701 - DNA, 15 bp, Homo sapiens
gattcccagaatgta

SEQ ID NO: 77702 - DNA, 15 bp, Homo sapiens
attcccagaatgtat

SEQ ID NO: 77703 - DNA, 15 bp, Homo sapiens
ttcccagaatgtatt

SEQ ID NO: 77704 - DNA, 15 bp, Homo sapiens
tcccagaatgtattc

SEQ ID NO: 77705 - DNA, 15 bp, Homo sapiens
cccagaatgtattct

SEQ ID NO: 77706 - DNA, 15 bp, Homo sapiens
ccagaatgtattctc

SEQ ID NO: 77707 - DNA, 15 bp, Homo sapiens
cagaatgtattctcc

SEQ ID NO: 77708 - DNA, 15 bp, Homo sapiens
agaatgtattctcct

SEQ ID NO: 77709 - DNA, 15 bp, Homo sapiens
gaatgtattctcctg

SEQ ID NO: 77710 - DNA, 15 bp, Homo sapiens
aatgtattctcctgc

SEQ ID NO: 77711 - DNA, 15 bp, Homo sapiens
atgtattctcctgca

SEQ ID NO: 77712 - DNA, 15 bp, Homo sapiens
tgtattctcctgcag

SEQ ID NO: 77713 - DNA, 15 bp, Homo sapiens
gtattctcctgcaga

SEQ ID NO: 77714 - DNA, 15 bp, Homo sapiens
tattctcctgcagaa

SEQ ID NO: 77715 - DNA, 15 bp, Homo sapiens
attctcctgcagaaa

SEQ ID NO: 77716 - DNA, 15 bp, Homo sapiens
ttctcctgcagaaaa

SEQ ID NO: 77717 - DNA, 15 bp, Homo sapiens
tctcctgcagaaaat

SEQ ID NO: 77718 - DNA, 15 bp, Homo sapiens
ctcctgcagaaaatg

SEQ ID NO: 77719 - DNA, 15 bp, Homo sapiens
tcctgcagaaaatgg

SEQ ID NO: 77720 - DNA, 15 bp, Homo sapiens
cctgcagaaaatgga

SEQ ID NO: 77721 - DNA, 15 bp, Homo sapiens
ctgcagaaaatggag

SEQ ID NO: 77722 - DNA, 15 bp, Homo sapiens
tgcagaaaatggagg

SEQ ID NO: 77723 - DNA, 15 bp, Homo sapiens
gcagaaaatggagga

SEQ ID NO: 77724 - DNA, 15 bp, Homo sapiens
cagaaaatggaggaa

SEQ ID NO: 77725 - DNA, 15 bp, Homo sapiens
agaaaatggaggaaa

SEQ ID NO: 77726 - DNA, 15 bp, Homo sapiens
gaaaatggaggaaaa

SEQ ID NO: 77727 - DNA, 15 bp, Homo sapiens
aaaatggaggaaaat

SEQ ID NO: 77728 - DNA, 15 bp, Homo sapiens
aaatggaggaaaata

SEQ ID NO: 77729 - DNA, 15 bp, Homo sapiens
aatggaggaaaataa

SEQ ID NO: 77730 - DNA, 15 bp, Homo sapiens
atggaggaaaataat

SEQ ID NO: 77731 - DNA, 15 bp, Homo sapiens
tggaggaaaataata

SEQ ID NO: 77732 - DNA, 15 bp, Homo sapiens
ggaggaaaataatac

SEQ ID NO: 77733 - DNA, 15 bp, Homo sapiens
gaggaaaataatact

SEQ ID NO: 77734 - DNA, 15 bp, Homo sapiens
aggaaaataatactt

SEQ ID NO: 77735 - DNA, 15 bp, Homo sapiens
ggaaaataatacttg

SEQ ID NO: 77736 - DNA, 15 bp, Homo sapiens
gaaaataatacttgg

SEQ ID NO: 77737 - DNA, 15 bp, Homo sapiens
aaaataatacttggc

SEQ ID NO: 77738 - DNA, 15 bp, Homo sapiens
aaataatacttggct

SEQ ID NO: 77739 - DNA, 15 bp, Homo sapiens
aataatacttggctt

SEQ ID NO: 77740 - DNA, 15 bp, Homo sapiens
ataatacttggcttc

SEQ ID NO: 77741 - DNA, 15 bp, Homo sapiens
taatacttggcttcc

SEQ ID NO: 77742 - DNA, 15 bp, Homo sapiens
aatacttggcttccc

SEQ ID NO: 77743 - DNA, 15 bp, Homo sapiens
atacttggcttccct

SEQ ID NO: 77744 - DNA, 15 bp, Homo sapiens
tacttggcttcccta

SEQ ID NO: 77745 - DNA, 15 bp, Homo sapiens
acttggcttccctaa

SEQ ID NO: 77746 - DNA, 15 bp, Homo sapiens
cttggcttccctaat

SEQ ID NO: 77747 - DNA, 15 bp, Homo sapiens
ttggcttccctaatg

SEQ ID NO: 77748 - DNA, 15 bp, Homo sapiens
tggcttccctaatga

SEQ ID NO: 77749 - DNA, 15 bp, Homo sapiens
ggcttccctaatgat

SEQ ID NO: 77750 - DNA, 15 bp, Homo sapiens
gcttccctaatgatt

SEQ ID NO: 77751 - DNA, 15 bp, Homo sapiens
cttccctaatgatta

SEQ ID NO: 77752 - DNA, 15 bp, Homo sapiens
ttccctaatgattac

SEQ ID NO: 77753 - DNA, 15 bp, Homo sapiens
tccctaatgattaca

SEQ ID NO: 77754 - DNA, 15 bp, Homo sapiens
ccctaatgattacat

SEQ ID NO: 77755 - DNA, 15 bp, Homo sapiens
cctaatgattacatg

SEQ ID NO: 77756 - DNA, 15 bp, Homo sapiens
ctaatgattacatgt

SEQ ID NO: 77757 - DNA, 15 bp, Homo sapiens
taatgattacatgtg

SEQ ID NO: 77758 - DNA, 15 bp, Homo sapiens
aatgattacatgtgt

SEQ ID NO: 77759 - DNA, 15 bp, Homo sapiens
atgattacatgtgta

SEQ ID NO: 77760 - DNA, 15 bp, Homo sapiens
tgattacatgtgtat

SEQ ID NO: 77761 - DNA, 15 bp, Homo sapiens
gattacatgtgtata

SEQ ID NO: 77762 - DNA, 15 bp, Homo sapiens
attacatgtgtatac

SEQ ID NO: 77763 - DNA, 15 bp, Homo sapiens
ttacatgtgtataca

SEQ ID NO: 77764 - DNA, 15 bp, Homo sapiens
tacatgtgtatacaa

SEQ ID NO: 77765 - DNA, 15 bp, Homo sapiens
acatgtgtatacaac

SEQ ID NO: 77766 - DNA, 15 bp, Homo sapiens
catgtgtatacaaca

SEQ ID NO: 77767 - DNA, 15 bp, Homo sapiens
atgtgtatacaacac

SEQ ID NO: 77768 - DNA, 15 bp, Homo sapiens
tgtgtatacaacact

SEQ ID NO: 77769 - DNA, 15 bp, Homo sapiens
gtgtatacaacacta

SEQ ID NO: 77770 - DNA, 15 bp, Homo sapiens
tgtatacaacactaa

SEQ ID NO: 77771 - DNA, 15 bp, Homo sapiens
gtatacaacactaac

SEQ ID NO: 77772 - DNA, 15 bp, Homo sapiens
tatacaacactaaca

SEQ ID NO: 77773 - DNA, 15 bp, Homo sapiens
atacaacactaacat

SEQ ID NO: 77774 - DNA, 15 bp, Homo sapiens
tacaacactaacatt

SEQ ID NO: 77775 - DNA, 15 bp, Homo sapiens
acaacactaacattt

SEQ ID NO: 77776 - DNA, 15 bp, Homo sapiens
caacactaacatttg

SEQ ID NO: 77777 - DNA, 15 bp, Homo sapiens
aacactaacatttgc

SEQ ID NO: 77778 - DNA, 15 bp, Homo sapiens
acactaacatttgca

SEQ ID NO: 77779 - DNA, 15 bp, Homo sapiens
cactaacatttgcaa

SEQ ID NO: 77780 - DNA, 15 bp, Homo sapiens
actaacatttgcaag

SEQ ID NO: 77781 - DNA, 15 bp, Homo sapiens
ctaacatttgcaaga

SEQ ID NO: 77782 - DNA, 15 bp, Homo sapiens
taacatttgcaagac

SEQ ID NO: 77783 - DNA, 15 bp, Homo sapiens
aacatttgcaagacc

SEQ ID NO: 77784 - DNA, 15 bp, Homo sapiens
acatttgcaagacca

SEQ ID NO: 77785 - DNA, 15 bp, Homo sapiens
catttgcaagaccac

SEQ ID NO: 77786 - DNA, 15 bp, Homo sapiens
atttgcaagaccacc

SEQ ID NO: 77787 - DNA, 15 bp, Homo sapiens
tttgcaagaccacct

SEQ ID NO: 77788 - DNA, 15 bp, Homo sapiens
ttgcaagaccacctt

SEQ ID NO: 77789 - DNA, 15 bp, Homo sapiens
tgcaagaccaccttt

SEQ ID NO: 77790 - DNA, 15 bp, Homo sapiens
gcaagaccaccttta

SEQ ID NO: 77791 - DNA, 15 bp, Homo sapiens
caagaccacctttaa

SEQ ID NO: 77792 - DNA, 15 bp, Homo sapiens
aagaccacctttaaa

SEQ ID NO: 77793 - DNA, 15 bp, Homo sapiens
agaccacctttaaat

SEQ ID NO: 77794 - DNA, 15 bp, Homo sapiens
gaccacctttaaata

SEQ ID NO: 77795 - DNA, 15 bp, Homo sapiens
accacctttaaataa

SEQ ID NO: 77796 - DNA, 15 bp, Homo sapiens
ccacctttaaataac

SEQ ID NO: 77797 - DNA, 15 bp, Homo sapiens
cacctttaaataaca

SEQ ID NO: 77798 - DNA, 15 bp, Homo sapiens
acctttaaataacac

SEQ ID NO: 77799 - DNA, 15 bp, Homo sapiens
cctttaaataacaca

SEQ ID NO: 77800 - DNA, 15 bp, Homo sapiens
ctttaaataacacac

SEQ ID NO: 77801 - DNA, 15 bp, Homo sapiens
tttaaataacacact

SEQ ID NO: 77802 - DNA, 15 bp, Homo sapiens
ttaaataacacactt

SEQ ID NO: 77803 - DNA, 15 bp, Homo sapiens
taaataacacactta

SEQ ID NO: 77804 - DNA, 15 bp, Homo sapiens
aaataacacacttag

SEQ ID NO: 77805 - DNA, 15 bp, Homo sapiens
aataacacacttagc

SEQ ID NO: 77806 - DNA, 15 bp, Homo sapiens
ataacacacttagca

SEQ ID NO: 77807 - DNA, 15 bp, Homo sapiens
taacacacttagcat

SEQ ID NO: 77808 - DNA, 15 bp, Homo sapiens
aacacacttagcatt

SEQ ID NO: 77809 - DNA, 15 bp, Homo sapiens
acacacttagcattt

SEQ ID NO: 77810 - DNA, 15 bp, Homo sapiens
cacacttagcatttt

SEQ ID NO: 77811 - DNA, 15 bp, Homo sapiens
acacttagcattttt

SEQ ID NO: 77812 - DNA, 15 bp, Homo sapiens
cacttagcattttta

SEQ ID NO: 77813 - DNA, 15 bp, Homo sapiens
acttagcatttttat

SEQ ID NO: 77814 - DNA, 15 bp, Homo sapiens
cttagcatttttatt

SEQ ID NO: 77815 - DNA, 15 bp, Homo sapiens
ttagcatttttattt

SEQ ID NO: 77816 - DNA, 15 bp, Homo sapiens
tagcatttttatttt

SEQ ID NO: 77817 - DNA, 15 bp, Homo sapiens
agcatttttatttta

SEQ ID NO: 77818 - DNA, 15 bp, Homo sapiens
gcatttttattttat

SEQ ID NO: 77819 - DNA, 15 bp, Homo sapiens
catttttattttatg

SEQ ID NO: 77820 - DNA, 15 bp, Homo sapiens
atttttattttatga

SEQ ID NO: 77821 - DNA, 15 bp, Homo sapiens
tttttattttatgaa

SEQ ID NO: 77822 - DNA, 15 bp, Homo sapiens
ttttattttatgaaa

SEQ ID NO: 77823 - DNA, 15 bp, Homo sapiens
tttattttatgaaat

SEQ ID NO: 77824 - DNA, 15 bp, Homo sapiens
ttattttatgaaatg

SEQ ID NO: 77825 - DNA, 15 bp, Homo sapiens
tattttatgaaatgt

SEQ ID NO: 77826 - DNA, 15 bp, Homo sapiens
attttatgaaatgta

SEQ ID NO: 77827 - DNA, 15 bp, Homo sapiens
ttttatgaaatgtaa

SEQ ID NO: 77828 - DNA, 15 bp, Homo sapiens
tttatgaaatgtaat

SEQ ID NO: 77829 - DNA, 15 bp, Homo sapiens
ttatgaaatgtaata

SEQ ID NO: 77830 - DNA, 15 bp, Homo sapiens
tatgaaatgtaatat

SEQ ID NO: 77831 - DNA, 15 bp, Homo sapiens
atgaaatgtaatatg

SEQ ID NO: 77832 - DNA, 15 bp, Homo sapiens
tgaaatgtaatatgt

SEQ ID NO: 77833 - DNA, 15 bp, Homo sapiens
gaaatgtaatatgta

SEQ ID NO: 77834 - DNA, 15 bp, Homo sapiens
aaatgtaatatgtag

SEQ ID NO: 77835 - DNA, 15 bp, Homo sapiens
aatgtaatatgtagt

SEQ ID NO: 77836 - DNA, 15 bp, Homo sapiens
atgtaatatgtagtt

SEQ ID NO: 77837 - DNA, 15 bp, Homo sapiens
tgtaatatgtagttc

SEQ ID NO: 77838 - DNA, 15 bp, Homo sapiens
gtaatatgtagttct

SEQ ID NO: 77839 - DNA, 15 bp, Homo sapiens
taatatgtagttctt

SEQ ID NO: 77840 - DNA, 15 bp, Homo sapiens
aatatgtagttcttt

SEQ ID NO: 77841 - DNA, 15 bp, Homo sapiens
atatgtagttctttg

SEQ ID NO: 77842 - DNA, 15 bp, Homo sapiens
tatgtagttctttgc

SEQ ID NO: 77843 - DNA, 15 bp, Homo sapiens
atgtagttctttgca

SEQ ID NO: 77844 - DNA, 15 bp, Homo sapiens
tgtagttctttgcat

SEQ ID NO: 77845 - DNA, 15 bp, Homo sapiens
gtagttctttgcata

SEQ ID NO: 77846 - DNA, 15 bp, Homo sapiens
tagttctttgcatag

SEQ ID NO: 77847 - DNA, 15 bp, Homo sapiens
agttctttgcatagt

SEQ ID NO: 77848 - DNA, 15 bp, Homo sapiens
gttctttgcatagtt

SEQ ID NO: 77849 - DNA, 15 bp, Homo sapiens
ttctttgcatagttt

SEQ ID NO: 77850 - DNA, 15 bp, Homo sapiens
tctttgcatagttta

SEQ ID NO: 77851 - DNA, 15 bp, Homo sapiens
ctttgcatagtttat

SEQ ID NO: 77852 - DNA, 15 bp, Homo sapiens
tttgcatagtttatc

SEQ ID NO: 77853 - DNA, 15 bp, Homo sapiens
ttgcatagtttatcc

SEQ ID NO: 77854 - DNA, 15 bp, Homo sapiens
tgcatagtttatcct

SEQ ID NO: 77855 - DNA, 15 bp, Homo sapiens
gcatagtttatccta

SEQ ID NO: 77856 - DNA, 15 bp, Homo sapiens
catagtttatcctat

SEQ ID NO: 77857 - DNA, 15 bp, Homo sapiens
atagtttatcctatt

SEQ ID NO: 77858 - DNA, 15 bp, Homo sapiens
tagtttatcctatta

SEQ ID NO: 77859 - DNA, 15 bp, Homo sapiens
agtttatcctattag

SEQ ID NO: 77860 - DNA, 15 bp, Homo sapiens
gtttatcctattagt

SEQ ID NO: 77861 - DNA, 15 bp, Homo sapiens
tttatcctattagta

SEQ ID NO: 77862 - DNA, 15 bp, Homo sapiens
ttatcctattagtaa

SEQ ID NO: 77863 - DNA, 15 bp, Homo sapiens
tatcctattagtaat

SEQ ID NO: 77864 - DNA, 15 bp, Homo sapiens
atcctattagtaatc

SEQ ID NO: 77865 - DNA, 15 bp, Homo sapiens
tcctattagtaatct

SEQ ID NO: 77866 - DNA, 15 bp, Homo sapiens
cctattagtaatcta

SEQ ID NO: 77867 - DNA, 15 bp, Homo sapiens
ctattagtaatctat

SEQ ID NO: 77868 - DNA, 15 bp, Homo sapiens
tattagtaatctatt

SEQ ID NO: 77869 - DNA, 15 bp, Homo sapiens
attagtaatctattc

SEQ ID NO: 77870 - DNA, 15 bp, Homo sapiens
ttagtaatctattct

SEQ ID NO: 77871 - DNA, 15 bp, Homo sapiens
tagtaatctattctg

SEQ ID NO: 77872 - DNA, 15 bp, Homo sapiens
agtaatctattctgt

SEQ ID NO: 77873 - DNA, 15 bp, Homo sapiens
gtaatctattctgtc

SEQ ID NO: 77874 - DNA, 15 bp, Homo sapiens
taatctattctgtct

SEQ ID NO: 77875 - DNA, 15 bp, Homo sapiens
aatctattctgtctt

SEQ ID NO: 77876 - DNA, 15 bp, Homo sapiens
atctattctgtcttt

SEQ ID NO: 77877 - DNA, 15 bp, Homo sapiens
tctattctgtctttg

SEQ ID NO: 77878 - DNA, 15 bp, Homo sapiens
ctattctgtctttgg

SEQ ID NO: 77879 - DNA, 15 bp, Homo sapiens
tattctgtctttgga

SEQ ID NO: 77880 - DNA, 15 bp, Homo sapiens
attctgtctttggaa

SEQ ID NO: 77881 - DNA, 15 bp, Homo sapiens
ttctgtctttggaat

SEQ ID NO: 77882 - DNA, 15 bp, Homo sapiens
tctgtctttggaata

SEQ ID NO: 77883 - DNA, 15 bp, Homo sapiens
ctgtctttggaatat

SEQ ID NO: 77884 - DNA, 15 bp, Homo sapiens
tgtctttggaatatg

SEQ ID NO: 77885 - DNA, 15 bp, Homo sapiens
gtctttggaatatgt

SEQ ID NO: 77886 - DNA, 15 bp, Homo sapiens
tctttggaatatgtt

SEQ ID NO: 77887 - DNA, 15 bp, Homo sapiens
ctttggaatatgttt

SEQ ID NO: 77888 - DNA, 15 bp, Homo sapiens
tttggaatatgtttt

SEQ ID NO: 77889 - DNA, 15 bp, Homo sapiens
ttggaatatgttttg

SEQ ID NO: 77890 - DNA, 15 bp, Homo sapiens
tggaatatgttttgt

SEQ ID NO: 77891 - DNA, 15 bp, Homo sapiens
ggaatatgttttgtg

SEQ ID NO: 77892 - DNA, 15 bp, Homo sapiens
gaatatgttttgtga

SEQ ID NO: 77893 - DNA, 15 bp, Homo sapiens
aatatgttttgtgat

SEQ ID NO: 77894 - DNA, 15 bp, Homo sapiens
atatgttttgtgatg

SEQ ID NO: 77895 - DNA, 15 bp, Homo sapiens
tatgttttgtgatga

SEQ ID NO: 77896 - DNA, 15 bp, Homo sapiens
atgttttgtgatgat

SEQ ID NO: 77897 - DNA, 15 bp, Homo sapiens
tgttttgtgatgatg

SEQ ID NO: 77898 - DNA, 15 bp, Homo sapiens
gttttgtgatgatga

SEQ ID NO: 77899 - DNA, 15 bp, Homo sapiens
ttttgtgatgatgaa

SEQ ID NO: 77900 - DNA, 15 bp, Homo sapiens
tttgtgatgatgaaa

SEQ ID NO: 77901 - DNA, 15 bp, Homo sapiens
ttgtgatgatgaaat

SEQ ID NO: 77902 - DNA, 15 bp, Homo sapiens
tgtgatgatgaaata

SEQ ID NO: 77903 - DNA, 15 bp, Homo sapiens
gtgatgatgaaataa

SEQ ID NO: 77904 - DNA, 15 bp, Homo sapiens
tgatgatgaaataaa

SEQ ID NO: 77905 - DNA, 15 bp, Homo sapiens
gatgatgaaataaat

SEQ ID NO: 77906 - DNA, 15 bp, Homo sapiens
atgatgaaataaata

SEQ ID NO: 77907 - DNA, 15 bp, Homo sapiens
tgatgaaataaatac

SEQ ID NO: 77908 - DNA, 15 bp, Homo sapiens
gatgaaataaatact

SEQ ID NO: 77909 - DNA, 15 bp, Homo sapiens
atgaaataaatacta

SEQ ID NO: 77910 - DNA, 15 bp, Homo sapiens
tgaaataaatactat

SEQ ID NO: 77911 - DNA, 15 bp, Homo sapiens
gaaataaatactata

SEQ ID NO: 77912 - DNA, 15 bp, Homo sapiens
aaataaatactataa

SEQ ID NO: 77913 - DNA, 15 bp, Homo sapiens
aataaatactataaa

SEQ ID NO: 77914 - DNA, 15 bp, Homo sapiens
ataaatactataaat

SEQ ID NO: 77915 - DNA, 15 bp, Homo sapiens
taaatactataaata

SEQ ID NO: 77916 - DNA, 15 bp, Homo sapiens
aaatactataaatag

SEQ ID NO: 77917 - DNA, 15 bp, Homo sapiens
aatactataaatagt

SEQ ID NO: 77918 - DNA, 15 bp, Homo sapiens
atactataaatagta

SEQ ID NO: 77919 - DNA, 15 bp, Homo sapiens
tactataaatagtat

SEQ ID NO: 77920 - DNA, 15 bp, Homo sapiens
actataaatagtatt

SEQ ID NO: 77921 - DNA, 15 bp, Homo sapiens
ctataaatagtatta

SEQ ID NO: 77922 - DNA, 15 bp, Homo sapiens
tataaatagtattat

SEQ ID NO: 77923 - DNA, 15 bp, Homo sapiens
ataaatagtattatt

SEQ ID NO: 77924 - DNA, 15 bp, Homo sapiens
taaatagtattattc

SEQ ID NO: 77925 - DNA, 15 bp, Homo sapiens
aaatagtattattcc

SEQ ID NO: 77926 - DNA, 15 bp, Homo sapiens
aatagtattattcct

SEQ ID NO: 77927 - DNA, 15 bp, Homo sapiens
atagtattattcctt

SEQ ID NO: 77928 - DNA, 15 bp, Homo sapiens
tagtattattccttt

SEQ ID NO: 77929 - DNA, 15 bp, Homo sapiens
agtattattcctttt

SEQ ID NO: 77930 - DNA, 15 bp, Homo sapiens
gtattattccttttg

SEQ ID NO: 77931 - DNA, 15 bp, Homo sapiens
tattattccttttgc

SEQ ID NO: 77932 - DNA, 15 bp, Homo sapiens
attattccttttgca

SEQ ID NO: 77933 - DNA, 15 bp, Homo sapiens
ttattccttttgcat

SEQ ID NO: 77934 - DNA, 15 bp, Homo sapiens
tattccttttgcatt

SEQ ID NO: 77935 - DNA, 15 bp, Homo sapiens
attccttttgcattg

SEQ ID NO: 77936 - DNA, 15 bp, Homo sapiens
ttccttttgcattga

SEQ ID NO: 77937 - DNA, 15 bp, Homo sapiens
tccttttgcattgag

SEQ ID NO: 77938 - DNA, 15 bp, Homo sapiens
ccttttgcattgaga

SEQ ID NO: 77939 - DNA, 15 bp, Homo sapiens
cttttgcattgagag

SEQ ID NO: 77940 - DNA, 15 bp, Homo sapiens
ttttgcattgagagt

SEQ ID NO: 77941 - DNA, 15 bp, Homo sapiens
tttgcattgagagtc

SEQ ID NO: 77942 - DNA, 15 bp, Homo sapiens
ttgcattgagagtcc

SEQ ID NO: 77943 - DNA, 15 bp, Homo sapiens
tgcattgagagtcct

SEQ ID NO: 77944 - DNA, 15 bp, Homo sapiens
gcattgagagtcctg

SEQ ID NO: 77945 - DNA, 15 bp, Homo sapiens
cattgagagtcctga

SEQ ID NO: 77946 - DNA, 15 bp, Homo sapiens
attgagagtcctgac

SEQ ID NO: 77947 - DNA, 15 bp, Homo sapiens
ttgagagtcctgacg

SEQ ID NO: 77948 - DNA, 15 bp, Homo sapiens
tgagagtcctgacga

SEQ ID NO: 77949 - DNA, 15 bp, Homo sapiens
gagagtcctgacgaa

SEQ ID NO: 77950 - DNA, 15 bp, Homo sapiens
agagtcctgacgaaa

SEQ ID NO: 77951 - DNA, 15 bp, Homo sapiens
gagtcctgacgaaat

SEQ ID NO: 77952 - DNA, 15 bp, Homo sapiens
agtcctgacgaaatg

SEQ ID NO: 77953 - DNA, 15 bp, Homo sapiens
gtcctgacgaaatgt

SEQ ID NO: 77954 - DNA, 15 bp, Homo sapiens
tcctgacgaaatgtc

SEQ ID NO: 77955 - DNA, 15 bp, Homo sapiens
cctgacgaaatgtcc

SEQ ID NO: 77956 - DNA, 15 bp, Homo sapiens
ctgacgaaatgtcca

SEQ ID NO: 77957 - DNA, 15 bp, Homo sapiens
tgacgaaatgtccat

SEQ ID NO: 77958 - DNA, 15 bp, Homo sapiens
gacgaaatgtccatg

SEQ ID NO: 77959 - DNA, 15 bp, Homo sapiens
acgaaatgtccatgt

SEQ ID NO: 77960 - DNA, 15 bp, Homo sapiens
cgaaatgtccatgtg

SEQ ID NO: 77961 - DNA, 15 bp, Homo sapiens
gaaatgtccatgtga

SEQ ID NO: 77962 - DNA, 15 bp, Homo sapiens
aaatgtccatgtgac

SEQ ID NO: 77963 - DNA, 15 bp, Homo sapiens
aatgtccatgtgaca

SEQ ID NO: 77964 - DNA, 15 bp, Homo sapiens
atgtccatgtgacag

SEQ ID NO: 77965 - DNA, 15 bp, Homo sapiens
tgtccatgtgacagt

SEQ ID NO: 77966 - DNA, 15 bp, Homo sapiens
gtccatgtgacagtt

SEQ ID NO: 77967 - DNA, 15 bp, Homo sapiens
tccatgtgacagttc

SEQ ID NO: 77968 - DNA, 15 bp, Homo sapiens
ccatgtgacagttca

SEQ ID NO: 77969 - DNA, 15 bp, Homo sapiens
catgtgacagttcat

SEQ ID NO: 77970 - DNA, 15 bp, Homo sapiens
atgtgacagttcatt

SEQ ID NO: 77971 - DNA, 15 bp, Homo sapiens
tgtgacagttcattt

SEQ ID NO: 77972 - DNA, 15 bp, Homo sapiens
gtgacagttcatttt

SEQ ID NO: 77973 - DNA, 15 bp, Homo sapiens
tgacagttcattttg

SEQ ID NO: 77974 - DNA, 15 bp, Homo sapiens
gacagttcattttgg

SEQ ID NO: 77975 - DNA, 15 bp, Homo sapiens
acagttcattttggg

SEQ ID NO: 77976 - DNA, 15 bp, Homo sapiens
cagttcattttgggt

SEQ ID NO: 77977 - DNA, 15 bp, Homo sapiens
agttcattttgggtt

SEQ ID NO: 77978 - DNA, 15 bp, Homo sapiens
gttcattttgggttt

SEQ ID NO: 77979 - DNA, 15 bp, Homo sapiens
ttcattttgggttta

SEQ ID NO: 77980 - DNA, 15 bp, Homo sapiens
tcattttgggtttag

SEQ ID NO: 77981 - DNA, 15 bp, Homo sapiens
cattttgggtttagc

SEQ ID NO: 77982 - DNA, 15 bp, Homo sapiens
attttgggtttagct

SEQ ID NO: 77983 - DNA, 15 bp, Homo sapiens
ttttgggtttagctc

SEQ ID NO: 77984 - DNA, 15 bp, Homo sapiens
tttgggtttagctct

SEQ ID NO: 77985 - DNA, 15 bp, Homo sapiens
ttgggtttagctcta

SEQ ID NO: 77986 - DNA, 15 bp, Homo sapiens
tgggtttagctctac

SEQ ID NO: 77987 - DNA, 15 bp, Homo sapiens
gggtttagctctacc

SEQ ID NO: 77988 - DNA, 15 bp, Homo sapiens
ggtttagctctacct

SEQ ID NO: 77989 - DNA, 15 bp, Homo sapiens
gtttagctctacctc

SEQ ID NO: 77990 - DNA, 15 bp, Homo sapiens
tttagctctacctct

SEQ ID NO: 77991 - DNA, 15 bp, Homo sapiens
ttagctctacctcta

SEQ ID NO: 77992 - DNA, 15 bp, Homo sapiens
tagctctacctctaa

SEQ ID NO: 77993 - DNA, 15 bp, Homo sapiens
agctctacctctaat

SEQ ID NO: 77994 - DNA, 15 bp, Homo sapiens
gctctacctctaata

SEQ ID NO: 77995 - DNA, 15 bp, Homo sapiens
ctctacctctaatat

SEQ ID NO: 77996 - DNA, 15 bp, Homo sapiens
tctacctctaatatg

SEQ ID NO: 77997 - DNA, 15 bp, Homo sapiens
ctacctctaatatgt

SEQ ID NO: 77998 - DNA, 15 bp, Homo sapiens
tacctctaatatgtg

SEQ ID NO: 77999 - DNA, 15 bp, Homo sapiens
acctctaatatgtga

SEQ ID NO: 78000 - DNA, 15 bp, Homo sapiens
cctctaatatgtgac

SEQ ID NO: 78001 - DNA, 15 bp, Homo sapiens
ctctaatatgtgacc

SEQ ID NO: 78002 - DNA, 15 bp, Homo sapiens
tctaatatgtgacct

SEQ ID NO: 78003 - DNA, 15 bp, Homo sapiens
ctaatatgtgaccta

SEQ ID NO: 78004 - DNA, 15 bp, Homo sapiens
taatatgtgacctat

SEQ ID NO: 78005 - DNA, 15 bp, Homo sapiens
aatatgtgacctatg

SEQ ID NO: 78006 - DNA, 15 bp, Homo sapiens
atatgtgacctatgc

SEQ ID NO: 78007 - DNA, 15 bp, Homo sapiens
atgtgacctatgcta

SEQ ID NO: 78008 - DNA, 15 bp, Homo sapiens
tgtgacctatgctac

SEQ ID NO: 78009 - DNA, 15 bp, Homo sapiens
gtgacctatgctacc

SEQ ID NO: 78010 - DNA, 15 bp, Homo sapiens
tgacctatgctacca

SEQ ID NO: 78011 - DNA, 15 bp, Homo sapiens
gacctatgctaccag

SEQ ID NO: 78012 - DNA, 15 bp, Homo sapiens
acctatgctaccagt

SEQ ID NO: 78013 - DNA, 15 bp, Homo sapiens
cctatgctaccagtc

SEQ ID NO: 78014 - DNA, 15 bp, Homo sapiens
ctatgctaccagtcc

SEQ ID NO: 78015 - DNA, 15 bp, Homo sapiens
tatgctaccagtccg

SEQ ID NO: 78016 - DNA, 15 bp, Homo sapiens
atgctaccagtccgt

SEQ ID NO: 78017 - DNA, 15 bp, Homo sapiens
tgctaccagtccgta

SEQ ID NO: 78018 - DNA, 15 bp, Homo sapiens
gctaccagtccgtat

SEQ ID NO: 78019 - DNA, 15 bp, Homo sapiens
ctaccagtccgtata

SEQ ID NO: 78020 - DNA, 15 bp, Homo sapiens
taccagtccgtatag

SEQ ID NO: 78021 - DNA, 15 bp, Homo sapiens
accagtccgtatagc

SEQ ID NO: 78022 - DNA, 15 bp, Homo sapiens
ccagtccgtatagcg

SEQ ID NO: 78023 - DNA, 15 bp, Homo sapiens
cagtccgtatagcgt

SEQ ID NO: 78024 - DNA, 15 bp, Homo sapiens
agtccgtatagcgta

SEQ ID NO: 78025 - DNA, 15 bp, Homo sapiens
gtccgtatagcgtaa

SEQ ID NO: 78026 - DNA, 15 bp, Homo sapiens
tccgtatagcgtaaa

SEQ ID NO: 78027 - DNA, 15 bp, Homo sapiens
ccgtatagcgtaaat

SEQ ID NO: 78028 - DNA, 15 bp, Homo sapiens
cgtatagcgtaaatt

SEQ ID NO: 78029 - DNA, 15 bp, Homo sapiens
gtatagcgtaaattc

SEQ ID NO: 78030 - DNA, 15 bp, Homo sapiens
tatagcgtaaattcc

SEQ ID NO: 78031 - DNA, 15 bp, Homo sapiens
atagcgtaaattccc

SEQ ID NO: 78032 - DNA, 15 bp, Homo sapiens
tagcgtaaattccca

SEQ ID NO: 78033 - DNA, 15 bp, Homo sapiens
agcgtaaattcccag

SEQ ID NO: 78034 - DNA, 15 bp, Homo sapiens
gcgtaaattcccaga

SEQ ID NO: 78035 - DNA, 15 bp, Homo sapiens
cgtaaattcccagaa

SEQ ID NO: 78036 - DNA, 15 bp, Homo sapiens
gtaaattcccagaat

SEQ ID NO: 78037 - DNA, 15 bp, Homo sapiens
taaattcccagaata

SEQ ID NO: 78038 - DNA, 15 bp, Homo sapiens
aaattcccagaatat

SEQ ID NO: 78039 - DNA, 15 bp, Homo sapiens
aattcccagaatata

SEQ ID NO: 78040 - DNA, 15 bp, Homo sapiens
attcccagaatatat

SEQ ID NO: 78041 - DNA, 15 bp, Homo sapiens
ttcccagaatatatc

SEQ ID NO: 78042 - DNA, 15 bp, Homo sapiens
tcccagaatatatcc

SEQ ID NO: 78043 - DNA, 15 bp, Homo sapiens
cccagaatatatcct

SEQ ID NO: 78044 - DNA, 15 bp, Homo sapiens
ccagaatatatcctc

SEQ ID NO: 78045 - DNA, 15 bp, Homo sapiens
cagaatatatcctcc

SEQ ID NO: 78046 - DNA, 15 bp, Homo sapiens
agaatatatcctcct

SEQ ID NO: 78047 - DNA, 15 bp, Homo sapiens
gaatatatcctcctg

SEQ ID NO: 78048 - DNA, 15 bp, Homo sapiens
aatatatcctcctga

SEQ ID NO: 78049 - DNA, 15 bp, Homo sapiens
atatatcctcctgaa

SEQ ID NO: 78050 - DNA, 15 bp, Homo sapiens
tatatcctcctgaat

SEQ ID NO: 78051 - DNA, 15 bp, Homo sapiens
atatcctcctgaata

SEQ ID NO: 78052 - DNA, 15 bp, Homo sapiens
tatcctcctgaataa

SEQ ID NO: 78053 - DNA, 15 bp, Homo sapiens
atcctcctgaataaa

SEQ ID NO: 78054 - DNA, 15 bp, Homo sapiens
tcctcctgaataaaa

SEQ ID NO: 78055 - DNA, 15 bp, Homo sapiens
cctcctgaataaaat

SEQ ID NO: 78056 - DNA, 15 bp, Homo sapiens
ctcctgaataaaatg

SEQ ID NO: 78057 - DNA, 15 bp, Homo sapiens
tcctgaataaaatgg

SEQ ID NO: 78058 - DNA, 15 bp, Homo sapiens
cctgaataaaatggg

SEQ ID NO: 78059 - DNA, 15 bp, Homo sapiens
ctgaataaaatgggg

SEQ ID NO: 78060 - DNA, 15 bp, Homo sapiens
tgaataaaatggggg

SEQ ID NO: 78061 - DNA, 15 bp, Homo sapiens
gaataaaatggggga

SEQ ID NO: 78062 - DNA, 15 bp, Homo sapiens
aataaaatgggggaa

SEQ ID NO: 78063 - DNA, 15 bp, Homo sapiens
ataaaatgggggaaa

SEQ ID NO: 78064 - DNA, 15 bp, Homo sapiens
taaaatgggggaaaa

SEQ ID NO: 78065 - DNA, 15 bp, Homo sapiens
aaaatgggggaaaat

SEQ ID NO: 78066 - DNA, 15 bp, Homo sapiens
aaatgggggaaaata

SEQ ID NO: 78067 - DNA, 15 bp, Homo sapiens
aatgggggaaaataa

SEQ ID NO: 78068 - DNA, 15 bp, Homo sapiens
atgggggaaaataat

SEQ ID NO: 78069 - DNA, 15 bp, Homo sapiens
tgggggaaaataata

SEQ ID NO: 78070 - DNA, 15 bp, Homo sapiens
gggggaaaataatac

SEQ ID NO: 78071 - DNA, 15 bp, Homo sapiens
ggggaaaataatacc

SEQ ID NO: 78072 - DNA, 15 bp, Homo sapiens
gggaaaataatacct

SEQ ID NO: 78073 - DNA, 15 bp, Homo sapiens
ggaaaataatacctg

SEQ ID NO: 78074 - DNA, 15 bp, Homo sapiens
gaaaataatacctgg

SEQ ID NO: 78075 - DNA, 15 bp, Homo sapiens
aaaataatacctggc

SEQ ID NO: 78076 - DNA, 15 bp, Homo sapiens
aaataatacctggct

SEQ ID NO: 78077 - DNA, 15 bp, Homo sapiens
aataatacctggctt

SEQ ID NO: 78078 - DNA, 15 bp, Homo sapiens
ataatacctggcttc

SEQ ID NO: 78079 - DNA, 15 bp, Homo sapiens
taatacctggcttcc

SEQ ID NO: 78080 - DNA, 15 bp, Homo sapiens
aatacctggcttcct

SEQ ID NO: 78081 - DNA, 15 bp, Homo sapiens
atacctggcttcctt

SEQ ID NO: 78082 - DNA, 15 bp, Homo sapiens
tacctggcttcctta

SEQ ID NO: 78083 - DNA, 15 bp, Homo sapiens
acctggcttccttaa

SEQ ID NO: 78084 - DNA, 15 bp, Homo sapiens
cctggcttccttaat

SEQ ID NO: 78085 - DNA, 15 bp, Homo sapiens
ctggcttccttaatg

SEQ ID NO: 78086 - DNA, 15 bp, Homo sapiens
tggcttccttaatga

SEQ ID NO: 78087 - DNA, 15 bp, Homo sapiens
ggcttccttaatgat

SEQ ID NO: 78088 - DNA, 15 bp, Homo sapiens
gcttccttaatgatt

SEQ ID NO: 78089 - DNA, 15 bp, Homo sapiens
cttccttaatgatta

SEQ ID NO: 78090 - DNA, 15 bp, Homo sapiens
ttccttaatgattat

SEQ ID NO: 78091 - DNA, 15 bp, Homo sapiens
tccttaatgattata

SEQ ID NO: 78092 - DNA, 15 bp, Homo sapiens
ccttaatgattatat

SEQ ID NO: 78093 - DNA, 15 bp, Homo sapiens
cttaatgattatatt

SEQ ID NO: 78094 - DNA, 15 bp, Homo sapiens
ttaatgattatattt

SEQ ID NO: 78095 - DNA, 15 bp, Homo sapiens
taatgattatattta

SEQ ID NO: 78096 - DNA, 15 bp, Homo sapiens
aatgattatatttaa

SEQ ID NO: 78097 - DNA, 15 bp, Homo sapiens
atgattatatttaag

SEQ ID NO: 78098 - DNA, 15 bp, Homo sapiens
tgattatatttaaga

SEQ ID NO: 78099 - DNA, 15 bp, Homo sapiens
gattatatttaagac

SEQ ID NO: 78100 - DNA, 15 bp, Homo sapiens
attatatttaagact

SEQ ID NO: 78101 - DNA, 15 bp, Homo sapiens
ttatatttaagactt

SEQ ID NO: 78102 - DNA, 15 bp, Homo sapiens
tatatttaagactta

SEQ ID NO: 78103 - DNA, 15 bp, Homo sapiens
atatttaagacttat

SEQ ID NO: 78104 - DNA, 15 bp, Homo sapiens
tatttaagacttatc

SEQ ID NO: 78105 - DNA, 15 bp, Homo sapiens
atttaagacttatca

SEQ ID NO: 78106 - DNA, 15 bp, Homo sapiens
tttaagacttatcaa

SEQ ID NO: 78107 - DNA, 15 bp, Homo sapiens
ttaagacttatcaag

SEQ ID NO: 78108 - DNA, 15 bp, Homo sapiens
taagacttatcaaga

SEQ ID NO: 78109 - DNA, 15 bp, Homo sapiens
aagacttatcaagag

SEQ ID NO: 78110 - DNA, 15 bp, Homo sapiens
agacttatcaagaga

SEQ ID NO: 78111 - DNA, 15 bp, Homo sapiens
gacttatcaagagac

SEQ ID NO: 78112 - DNA, 15 bp, Homo sapiens
acttatcaagagact

SEQ ID NO: 78113 - DNA, 15 bp, Homo sapiens
cttatcaagagacta

SEQ ID NO: 78114 - DNA, 15 bp, Homo sapiens
ttatcaagagactat

SEQ ID NO: 78115 - DNA, 15 bp, Homo sapiens
tatcaagagactatt

SEQ ID NO: 78116 - DNA, 15 bp, Homo sapiens
atcaagagactattt

SEQ ID NO: 78117 - DNA, 15 bp, Homo sapiens
tcaagagactatttt

SEQ ID NO: 78118 - DNA, 15 bp, Homo sapiens
caagagactattttc

SEQ ID NO: 78119 - DNA, 15 bp, Homo sapiens
aagagactattttct

SEQ ID NO: 78120 - DNA, 15 bp, Homo sapiens
agagactattttcta

SEQ ID NO: 78121 - DNA, 15 bp, Homo sapiens
gagactattttctat

SEQ ID NO: 78122 - DNA, 15 bp, Homo sapiens
agactattttctatt

SEQ ID NO: 78123 - DNA, 15 bp, Homo sapiens
gactattttctattt

SEQ ID NO: 78124 - DNA, 15 bp, Homo sapiens
actattttctattta

SEQ ID NO: 78125 - DNA, 15 bp, Homo sapiens
ctattttctatttaa

SEQ ID NO: 78126 - DNA, 15 bp, Homo sapiens
tattttctatttaac

SEQ ID NO: 78127 - DNA, 15 bp, Homo sapiens
attttctatttaaca

SEQ ID NO: 78128 - DNA, 15 bp, Homo sapiens
ttttctatttaacaa

SEQ ID NO: 78129 - DNA, 15 bp, Homo sapiens
tttctatttaacaat

SEQ ID NO: 78130 - DNA, 15 bp, Homo sapiens
ttctatttaacaatt

SEQ ID NO: 78131 - DNA, 15 bp, Homo sapiens
tctatttaacaatta

SEQ ID NO: 78132 - DNA, 15 bp, Homo sapiens
ctatttaacaattag

SEQ ID NO: 78133 - DNA, 15 bp, Homo sapiens
tatttaacaattaga

SEQ ID NO: 78134 - DNA, 15 bp, Homo sapiens
atttaacaattagaa

SEQ ID NO: 78135 - DNA, 15 bp, Homo sapiens
tttaacaattagaaa

SEQ ID NO: 78136 - DNA, 15 bp, Homo sapiens
ttaacaattagaaag

SEQ ID NO: 78137 - DNA, 15 bp, Homo sapiens
taacaattagaaagt

SEQ ID NO: 78138 - DNA, 15 bp, Homo sapiens
aacaattagaaagtt

SEQ ID NO: 78139 - DNA, 15 bp, Homo sapiens
acaattagaaagtta

SEQ ID NO: 78140 - DNA, 15 bp, Homo sapiens
caattagaaagttaa

SEQ ID NO: 78141 - DNA, 15 bp, Homo sapiens
aattagaaagttaag

SEQ ID NO: 78142 - DNA, 15 bp, Homo sapiens
attagaaagttaagc

SEQ ID NO: 78143 - DNA, 15 bp, Homo sapiens
ttagaaagttaagca

SEQ ID NO: 78144 - DNA, 15 bp, Homo sapiens
tagaaagttaagcaa

SEQ ID NO: 78145 - DNA, 15 bp, Homo sapiens
agaaagttaagcaat

SEQ ID NO: 78146 - DNA, 15 bp, Homo sapiens
gaaagttaagcaata

SEQ ID NO: 78147 - DNA, 15 bp, Homo sapiens
aaagttaagcaatac

SEQ ID NO: 78148 - DNA, 15 bp, Homo sapiens
aagttaagcaataca

SEQ ID NO: 78149 - DNA, 15 bp, Homo sapiens
agttaagcaatacat

SEQ ID NO: 78150 - DNA, 15 bp, Homo sapiens
gttaagcaatacatt

SEQ ID NO: 78151 - DNA, 15 bp, Homo sapiens
ttaagcaatacatta

SEQ ID NO: 78152 - DNA, 15 bp, Homo sapiens
taagcaatacattat

SEQ ID NO: 78153 - DNA, 15 bp, Homo sapiens
aagcaatacattatt

SEQ ID NO: 78154 - DNA, 15 bp, Homo sapiens
agcaatacattattt

SEQ ID NO: 78155 - DNA, 15 bp, Homo sapiens
gcaatacattatttt

SEQ ID NO: 78156 - DNA, 15 bp, Homo sapiens
caatacattattttt

SEQ ID NO: 78157 - DNA, 15 bp, Homo sapiens
aatacattatttttc

SEQ ID NO: 78158 - DNA, 15 bp, Homo sapiens
atacattatttttct

SEQ ID NO: 78159 - DNA, 15 bp, Homo sapiens
tacattatttttctc

SEQ ID NO: 78160 - DNA, 15 bp, Homo sapiens
acattatttttctct

SEQ ID NO: 78161 - DNA, 15 bp, Homo sapiens
cattatttttctctg

SEQ ID NO: 78162 - DNA, 15 bp, Homo sapiens
attatttttctctgg

SEQ ID NO: 78163 - DNA, 15 bp, Homo sapiens
ttatttttctctgga

SEQ ID NO: 78164 - DNA, 15 bp, Homo sapiens
tatttttctctggaa

SEQ ID NO: 78165 - DNA, 15 bp, Homo sapiens
atttttctctggaat

SEQ ID NO: 78166 - DNA, 15 bp, Homo sapiens
tttttctctggaatc

SEQ ID NO: 78167 - DNA, 15 bp, Homo sapiens
ttttctctggaatcc

SEQ ID NO: 78168 - DNA, 15 bp, Homo sapiens
tttctctggaatcca

SEQ ID NO: 78169 - DNA, 15 bp, Homo sapiens
ttctctggaatccag

SEQ ID NO: 78170 - DNA, 15 bp, Homo sapiens
tctctggaatccagt

SEQ ID NO: 78171 - DNA, 15 bp, Homo sapiens
ctctggaatccagtg

SEQ ID NO: 78172 - DNA, 15 bp, Homo sapiens
tctggaatccagtgt

SEQ ID NO: 78173 - DNA, 15 bp, Homo sapiens
ctggaatccagtgtt

SEQ ID NO: 78174 - DNA, 15 bp, Homo sapiens
tggaatccagtgttt

SEQ ID NO: 78175 - DNA, 15 bp, Homo sapiens
ggaatccagtgtttc

SEQ ID NO: 78176 - DNA, 15 bp, Homo sapiens
gaatccagtgtttct

SEQ ID NO: 78177 - DNA, 15 bp, Homo sapiens
aatccagtgtttctt

SEQ ID NO: 78178 - DNA, 15 bp, Homo sapiens
atccagtgtttcttt

SEQ ID NO: 78179 - DNA, 15 bp, Homo sapiens
tccagtgtttctttt

SEQ ID NO: 78180 - DNA, 15 bp, Homo sapiens
ccagtgtttctttta

SEQ ID NO: 78181 - DNA, 15 bp, Homo sapiens
cagtgtttcttttaa

SEQ ID NO: 78182 - DNA, 15 bp, Homo sapiens
agtgtttcttttaaa

SEQ ID NO: 78183 - DNA, 15 bp, Homo sapiens
gtgtttcttttaaat

SEQ ID NO: 78184 - DNA, 15 bp, Homo sapiens
tgtttcttttaaata

SEQ ID NO: 78185 - DNA, 15 bp, Homo sapiens
gtttcttttaaatac

SEQ ID NO: 78186 - DNA, 15 bp, Homo sapiens
tttcttttaaatacc

SEQ ID NO: 78187 - DNA, 15 bp, Homo sapiens
ttcttttaaatacct

SEQ ID NO: 78188 - DNA, 15 bp, Homo sapiens
tcttttaaatacctg

SEQ ID NO: 78189 - DNA, 15 bp, Homo sapiens
cttttaaatacctgt

SEQ ID NO: 78190 - DNA, 15 bp, Homo sapiens
ttttaaatacctgtt

SEQ ID NO: 78191 - DNA, 15 bp, Homo sapiens
tttaaatacctgtta

SEQ ID NO: 78192 - DNA, 15 bp, Homo sapiens
ttaaatacctgttaa

SEQ ID NO: 78193 - DNA, 15 bp, Homo sapiens
taaatacctgttaag

SEQ ID NO: 78194 - DNA, 15 bp, Homo sapiens
aaatacctgttaagt

SEQ ID NO: 78195 - DNA, 15 bp, Homo sapiens
aatacctgttaagtt

SEQ ID NO: 78196 - DNA, 15 bp, Homo sapiens
atacctgttaagttt

SEQ ID NO: 78197 - DNA, 15 bp, Homo sapiens
tacctgttaagtttg

SEQ ID NO: 78198 - DNA, 15 bp, Homo sapiens
acctgttaagtttgt

SEQ ID NO: 78199 - DNA, 15 bp, Homo sapiens
cctgttaagtttgta

SEQ ID NO: 78200 - DNA, 15 bp, Homo sapiens
ctgttaagtttgtat

SEQ ID NO: 78201 - DNA, 15 bp, Homo sapiens
tgttaagtttgtatg

SEQ ID NO: 78202 - DNA, 15 bp, Homo sapiens
gttaagtttgtatgc

SEQ ID NO: 78203 - DNA, 15 bp, Homo sapiens
ttaagtttgtatgca

SEQ ID NO: 78204 - DNA, 15 bp, Homo sapiens
taagtttgtatgcaa

SEQ ID NO: 78205 - DNA, 15 bp, Homo sapiens
aagtttgtatgcaac

SEQ ID NO: 78206 - DNA, 15 bp, Homo sapiens
agtttgtatgcaaca

SEQ ID NO: 78207 - DNA, 15 bp, Homo sapiens
gtttgtatgcaacat

SEQ ID NO: 78208 - DNA, 15 bp, Homo sapiens
tttgtatgcaacatt

SEQ ID NO: 78209 - DNA, 15 bp, Homo sapiens
ttgtatgcaacattt

SEQ ID NO: 78210 - DNA, 15 bp, Homo sapiens
tgtatgcaacatttc

SEQ ID NO: 78211 - DNA, 15 bp, Homo sapiens
gtatgcaacatttct

SEQ ID NO: 78212 - DNA, 15 bp, Homo sapiens
tatgcaacatttcta

SEQ ID NO: 78213 - DNA, 15 bp, Homo sapiens
atgcaacatttctaa

SEQ ID NO: 78214 - DNA, 15 bp, Homo sapiens
tgcaacatttctaaa

SEQ ID NO: 78215 - DNA, 15 bp, Homo sapiens
gcaacatttctaaag

SEQ ID NO: 78216 - DNA, 15 bp, Homo sapiens
caacatttctaaagt

SEQ ID NO: 78217 - DNA, 15 bp, Homo sapiens
aacatttctaaagtt

SEQ ID NO: 78218 - DNA, 15 bp, Homo sapiens
acatttctaaagtta

SEQ ID NO: 78219 - DNA, 15 bp, Homo sapiens
catttctaaagttac

SEQ ID NO: 78220 - DNA, 15 bp, Homo sapiens
atttctaaagttacc

SEQ ID NO: 78221 - DNA, 15 bp, Homo sapiens
tttctaaagttacct

SEQ ID NO: 78222 - DNA, 15 bp, Homo sapiens
ttctaaagttaccta

SEQ ID NO: 78223 - DNA, 15 bp, Homo sapiens
tctaaagttacctac

SEQ ID NO: 78224 - DNA, 15 bp, Homo sapiens
ctaaagttacctact

SEQ ID NO: 78225 - DNA, 15 bp, Homo sapiens
taaagttacctactt

SEQ ID NO: 78226 - DNA, 15 bp, Homo sapiens
aaagttacctacttg

SEQ ID NO: 78227 - DNA, 15 bp, Homo sapiens
aagttacctacttgt

SEQ ID NO: 78228 - DNA, 15 bp, Homo sapiens
agttacctacttgtt

SEQ ID NO: 78229 - DNA, 15 bp, Homo sapiens
gttacctacttgtta

SEQ ID NO: 78230 - DNA, 15 bp, Homo sapiens
ttacctacttgttaa

SEQ ID NO: 78231 - DNA, 15 bp, Homo sapiens
tacctacttgttaat

SEQ ID NO: 78232 - DNA, 15 bp, Homo sapiens
acctacttgttaatt

SEQ ID NO: 78233 - DNA, 15 bp, Homo sapiens
cctacttgttaatta

SEQ ID NO: 78234 - DNA, 15 bp, Homo sapiens
ctacttgttaattaa

SEQ ID NO: 78235 - DNA, 15 bp, Homo sapiens
tacttgttaattaaa

SEQ ID NO: 78236 - DNA, 15 bp, Homo sapiens
acttgttaattaaaa

SEQ ID NO: 78237 - DNA, 15 bp, Homo sapiens
cttgttaattaaaaa

SEQ ID NO: 78238 - DNA, 15 bp, Homo sapiens
ttgttaattaaaaat

SEQ ID NO: 78239 - DNA, 15 bp, Homo sapiens
tgttaattaaaaatt

SEQ ID NO: 78240 - DNA, 15 bp, Homo sapiens
gttaattaaaaattc

SEQ ID NO: 78241 - DNA, 15 bp, Homo sapiens
ttaattaaaaattca

SEQ ID NO: 78242 - DNA, 15 bp, Homo sapiens
taattaaaaattcaa

SEQ ID NO: 78243 - DNA, 15 bp, Homo sapiens
aattaaaaattcaag

SEQ ID NO: 78244 - DNA, 15 bp, Homo sapiens
attaaaaattcaaga

SEQ ID NO: 78245 - DNA, 15 bp, Homo sapiens
ttaaaaattcaagag

SEQ ID NO: 78246 - DNA, 15 bp, Homo sapiens
taaaaattcaagagt

SEQ ID NO: 78247 - DNA, 15 bp, Homo sapiens
aaaaattcaagagtt

SEQ ID NO: 78248 - DNA, 15 bp, Homo sapiens
aaaattcaagagttt

SEQ ID NO: 78249 - DNA, 15 bp, Homo sapiens
aaattcaagagtttt

SEQ ID NO: 78250 - DNA, 15 bp, Homo sapiens
aattcaagagttttt

SEQ ID NO: 78251 - DNA, 15 bp, Homo sapiens
attcaagagtttttt

SEQ ID NO: 78252 - DNA, 15 bp, Homo sapiens
ttcaagagttttttt

SEQ ID NO: 78253 - DNA, 15 bp, Homo sapiens
tcaagagtttttttt

SEQ ID NO: 78254 - DNA, 15 bp, Homo sapiens
caagagttttttttt

SEQ ID NO: 78255 - DNA, 15 bp, Homo sapiens
aagagtttttttttc

SEQ ID NO: 78256 - DNA, 15 bp, Homo sapiens
agagtttttttttct

SEQ ID NO: 78257 - DNA, 15 bp, Homo sapiens
gagtttttttttctt

SEQ ID NO: 78258 - DNA, 15 bp, Homo sapiens
agtttttttttctta

SEQ ID NO: 78259 - DNA, 15 bp, Homo sapiens
gtttttttttcttat

SEQ ID NO: 78260 - DNA, 15 bp, Homo sapiens
tttttttttcttatt

SEQ ID NO: 78261 - DNA, 15 bp, Homo sapiens
ttttttttcttattc

SEQ ID NO: 78262 - DNA, 15 bp, Homo sapiens
tttttttcttattct

SEQ ID NO: 78263 - DNA, 15 bp, Homo sapiens
ttttttcttattctg

SEQ ID NO: 78264 - DNA, 15 bp, Homo sapiens
tttttcttattctga

SEQ ID NO: 78265 - DNA, 15 bp, Homo sapiens
ttttcttattctgag

SEQ ID NO: 78266 - DNA, 15 bp, Homo sapiens
tttcttattctgagg

SEQ ID NO: 78267 - DNA, 15 bp, Homo sapiens
ttcttattctgaggt

SEQ ID NO: 78268 - DNA, 15 bp, Homo sapiens
tcttattctgaggtt

SEQ ID NO: 78269 - DNA, 15 bp, Homo sapiens
cttattctgaggtta

SEQ ID NO: 78270 - DNA, 15 bp, Homo sapiens
ttattctgaggttat

SEQ ID NO: 78271 - DNA, 15 bp, Homo sapiens
tattctgaggttatc

SEQ ID NO: 78272 - DNA, 15 bp, Homo sapiens
attctgaggttatct

SEQ ID NO: 78273 - DNA, 15 bp, Homo sapiens
ttctgaggttatctt

SEQ ID NO: 78274 - DNA, 15 bp, Homo sapiens
tctgaggttatcttt

SEQ ID NO: 78275 - DNA, 15 bp, Homo sapiens
ctgaggttatctttt

SEQ ID NO: 78276 - DNA, 15 bp, Homo sapiens
tgaggttatcttttt

SEQ ID NO: 78277 - DNA, 15 bp, Homo sapiens
gaggttatcttttta

SEQ ID NO: 78278 - DNA, 15 bp, Homo sapiens
aggttatctttttac

SEQ ID NO: 78279 - DNA, 15 bp, Homo sapiens
ggttatctttttacc

SEQ ID NO: 78280 - DNA, 15 bp, Homo sapiens
gttatctttttacca

SEQ ID NO: 78281 - DNA, 15 bp, Homo sapiens
ttatctttttaccac

SEQ ID NO: 78282 - DNA, 15 bp, Homo sapiens
tatctttttaccaca

SEQ ID NO: 78283 - DNA, 15 bp, Homo sapiens
atctttttaccacag

SEQ ID NO: 78284 - DNA, 15 bp, Homo sapiens
tctttttaccacagt

SEQ ID NO: 78285 - DNA, 15 bp, Homo sapiens
ctttttaccacagtt

SEQ ID NO: 78286 - DNA, 15 bp, Homo sapiens
tttttaccacagttg

SEQ ID NO: 78287 - DNA, 15 bp, Homo sapiens
ttttaccacagttgc

SEQ ID NO: 78288 - DNA, 15 bp, Homo sapiens
tttaccacagttgca

SEQ ID NO: 78289 - DNA, 15 bp, Homo sapiens
ttaccacagttgcac

SEQ ID NO: 78290 - DNA, 15 bp, Homo sapiens
taccacagttgcaca

SEQ ID NO: 78291 - DNA, 15 bp, Homo sapiens
accacagttgcacaa

SEQ ID NO: 78292 - DNA, 15 bp, Homo sapiens
ccacagttgcacaat

SEQ ID NO: 78293 - DNA, 15 bp, Homo sapiens
cacagttgcacaata

SEQ ID NO: 78294 - DNA, 15 bp, Homo sapiens
acagttgcacaatat

SEQ ID NO: 78295 - DNA, 15 bp, Homo sapiens
cagttgcacaatatc

SEQ ID NO: 78296 - DNA, 15 bp, Homo sapiens
agttgcacaatatcc

SEQ ID NO: 78297 - DNA, 15 bp, Homo sapiens
gttgcacaatatcct

SEQ ID NO: 78298 - DNA, 15 bp, Homo sapiens
ttgcacaatatcctt

SEQ ID NO: 78299 - DNA, 15 bp, Homo sapiens
tgcacaatatccttt

SEQ ID NO: 78300 - DNA, 15 bp, Homo sapiens
gcacaatatcctttt

SEQ ID NO: 78301 - DNA, 15 bp, Homo sapiens
cacaatatccttttg

SEQ ID NO: 78302 - DNA, 15 bp, Homo sapiens
acaatatccttttga

SEQ ID NO: 78303 - DNA, 15 bp, Homo sapiens
caatatccttttgaa

SEQ ID NO: 78304 - DNA, 15 bp, Homo sapiens
aatatccttttgaag

SEQ ID NO: 78305 - DNA, 15 bp, Homo sapiens
atatccttttgaaga

SEQ ID NO: 78306 - DNA, 15 bp, Homo sapiens
tatccttttgaagac

SEQ ID NO: 78307 - DNA, 15 bp, Homo sapiens
atccttttgaagacc

SEQ ID NO: 78308 - DNA, 15 bp, Homo sapiens
tccttttgaagacca

SEQ ID NO: 78309 - DNA, 15 bp, Homo sapiens
ccttttgaagaccat

SEQ ID NO: 78310 - DNA, 15 bp, Homo sapiens
cttttgaagaccata

SEQ ID NO: 78311 - DNA, 15 bp, Homo sapiens
ttttgaagaccataa

SEQ ID NO: 78312 - DNA, 15 bp, Homo sapiens
tttgaagaccataac

SEQ ID NO: 78313 - DNA, 15 bp, Homo sapiens
ttgaagaccataacc

SEQ ID NO: 78314 - DNA, 15 bp, Homo sapiens
tgaagaccataaccc

SEQ ID NO: 78315 - DNA, 15 bp, Homo sapiens
gaagaccataaccca

SEQ ID NO: 78316 - DNA, 15 bp, Homo sapiens
aagaccataacccac

SEQ ID NO: 78317 - DNA, 15 bp, Homo sapiens
agaccataacccacc

SEQ ID NO: 78318 - DNA, 15 bp, Homo sapiens
gaccataacccacca

SEQ ID NO: 78319 - DNA, 15 bp, Homo sapiens
accataacccaccac

SEQ ID NO: 78320 - DNA, 15 bp, Homo sapiens
ccataacccaccaca

SEQ ID NO: 78321 - DNA, 15 bp, Homo sapiens
cataacccaccacag

SEQ ID NO: 78322 - DNA, 15 bp, Homo sapiens
ataacccaccacagc

SEQ ID NO: 78323 - DNA, 15 bp, Homo sapiens
taacccaccacagct

SEQ ID NO: 78324 - DNA, 15 bp, Homo sapiens
aacccaccacagcta

SEQ ID NO: 78325 - DNA, 15 bp, Homo sapiens
acccaccacagctag

SEQ ID NO: 78326 - DNA, 15 bp, Homo sapiens
cccaccacagctaga

SEQ ID NO: 78327 - DNA, 15 bp, Homo sapiens
ccaccacagctagaa

SEQ ID NO: 78328 - DNA, 15 bp, Homo sapiens
caccacagctagaac

SEQ ID NO: 78329 - DNA, 15 bp, Homo sapiens
accacagctagaact

SEQ ID NO: 78330 - DNA, 15 bp, Homo sapiens
ccacagctagaactt

SEQ ID NO: 78331 - DNA, 15 bp, Homo sapiens
cacagctagaactta

SEQ ID NO: 78332 - DNA, 15 bp, Homo sapiens
acagctagaacttat

SEQ ID NO: 78333 - DNA, 15 bp, Homo sapiens
cagctagaacttatc

SEQ ID NO: 78334 - DNA, 15 bp, Homo sapiens
agctagaacttatca

SEQ ID NO: 78335 - DNA, 15 bp, Homo sapiens
gctagaacttatcaa

SEQ ID NO: 78336 - DNA, 15 bp, Homo sapiens
ctagaacttatcaaa

SEQ ID NO: 78337 - DNA, 15 bp, Homo sapiens
tagaacttatcaaac

SEQ ID NO: 78338 - DNA, 15 bp, Homo sapiens
agaacttatcaaacc

SEQ ID NO: 78339 - DNA, 15 bp, Homo sapiens
gaacttatcaaaccc

SEQ ID NO: 78340 - DNA, 15 bp, Homo sapiens
aacttatcaaaccct

SEQ ID NO: 78341 - DNA, 15 bp, Homo sapiens
acttatcaaaccctt

SEQ ID NO: 78342 - DNA, 15 bp, Homo sapiens
cttatcaaacccttt

SEQ ID NO: 78343 - DNA, 15 bp, Homo sapiens
ttatcaaaccctttt

SEQ ID NO: 78344 - DNA, 15 bp, Homo sapiens
tatcaaacccttttg

SEQ ID NO: 78345 - DNA, 15 bp, Homo sapiens
atcaaacccttttgt

SEQ ID NO: 78346 - DNA, 15 bp, Homo sapiens
tcaaacccttttgtg

SEQ ID NO: 78347 - DNA, 15 bp, Homo sapiens
caaacccttttgtga

SEQ ID NO: 78348 - DNA, 15 bp, Homo sapiens
aaacccttttgtgaa

SEQ ID NO: 78349 - DNA, 15 bp, Homo sapiens
aacccttttgtgaag

SEQ ID NO: 78350 - DNA, 15 bp, Homo sapiens
acccttttgtgaaga

SEQ ID NO: 78351 - DNA, 15 bp, Homo sapiens
cccttttgtgaagat

SEQ ID NO: 78352 - DNA, 15 bp, Homo sapiens
ccttttgtgaagatc

SEQ ID NO: 78353 - DNA, 15 bp, Homo sapiens
cttttgtgaagatct

SEQ ID NO: 78354 - DNA, 15 bp, Homo sapiens
ttttgtgaagatctt

SEQ ID NO: 78355 - DNA, 15 bp, Homo sapiens
tttgtgaagatcttg

SEQ ID NO: 78356 - DNA, 15 bp, Homo sapiens
ttgtgaagatcttga

SEQ ID NO: 78357 - DNA, 15 bp, Homo sapiens
tgtgaagatcttgac

SEQ ID NO: 78358 - DNA, 15 bp, Homo sapiens
gtgaagatcttgacc

SEQ ID NO: 78359 - DNA, 15 bp, Homo sapiens
tgaagatcttgacca

SEQ ID NO: 78360 - DNA, 15 bp, Homo sapiens
gaagatcttgaccaa

SEQ ID NO: 78361 - DNA, 15 bp, Homo sapiens
aagatcttgaccaat

SEQ ID NO: 78362 - DNA, 15 bp, Homo sapiens
agatcttgaccaatg

SEQ ID NO: 78363 - DNA, 15 bp, Homo sapiens
gatcttgaccaatgg

SEQ ID NO: 78364 - DNA, 15 bp, Homo sapiens
atcttgaccaatggc

SEQ ID NO: 78365 - DNA, 15 bp, Homo sapiens
tcttgaccaatggct

SEQ ID NO: 78366 - DNA, 15 bp, Homo sapiens
cttgaccaatggcta

SEQ ID NO: 78367 - DNA, 15 bp, Homo sapiens
ttgaccaatggctaa

SEQ ID NO: 78368 - DNA, 15 bp, Homo sapiens
tgaccaatggctaag

SEQ ID NO: 78369 - DNA, 15 bp, Homo sapiens
gaccaatggctaagt

SEQ ID NO: 78370 - DNA, 15 bp, Homo sapiens
accaatggctaagtg

SEQ ID NO: 78371 - DNA, 15 bp, Homo sapiens
ccaatggctaagtga

SEQ ID NO: 78372 - DNA, 15 bp, Homo sapiens
caatggctaagtgaa

SEQ ID NO: 78373 - DNA, 15 bp, Homo sapiens
aatggctaagtgaag

SEQ ID NO: 78374 - DNA, 15 bp, Homo sapiens
atggctaagtgaaga

SEQ ID NO: 78375 - DNA, 15 bp, Homo sapiens
tggctaagtgaagat

SEQ ID NO: 78376 - DNA, 15 bp, Homo sapiens
ggctaagtgaagatg

SEQ ID NO: 78377 - DNA, 15 bp, Homo sapiens
gctaagtgaagatga

SEQ ID NO: 78378 - DNA, 15 bp, Homo sapiens
ctaagtgaagatgac

SEQ ID NO: 78379 - DNA, 15 bp, Homo sapiens
taagtgaagatgaca

SEQ ID NO: 78380 - DNA, 15 bp, Homo sapiens
aagtgaagatgacaa

SEQ ID NO: 78381 - DNA, 15 bp, Homo sapiens
agtgaagatgacaat

SEQ ID NO: 78382 - DNA, 15 bp, Homo sapiens
gtgaagatgacaatc

SEQ ID NO: 78383 - DNA, 15 bp, Homo sapiens
tgaagatgacaatca

SEQ ID NO: 78384 - DNA, 15 bp, Homo sapiens
gaagatgacaatcat

SEQ ID NO: 78385 - DNA, 15 bp, Homo sapiens
aagatgacaatcatg

SEQ ID NO: 78386 - DNA, 15 bp, Homo sapiens
agatgacaatcatgt

SEQ ID NO: 78387 - DNA, 15 bp, Homo sapiens
gatgacaatcatgtt

SEQ ID NO: 78388 - DNA, 15 bp, Homo sapiens
atgacaatcatgttg

SEQ ID NO: 78389 - DNA, 15 bp, Homo sapiens
tgacaatcatgttgc

SEQ ID NO: 78390 - DNA, 15 bp, Homo sapiens
gacaatcatgttgca

SEQ ID NO: 78391 - DNA, 15 bp, Homo sapiens
acaatcatgttgcag

SEQ ID NO: 78392 - DNA, 15 bp, Homo sapiens
caatcatgttgcagc

SEQ ID NO: 78393 - DNA, 15 bp, Homo sapiens
aatcatgttgcagca

SEQ ID NO: 78394 - DNA, 15 bp, Homo sapiens
atcatgttgcagcaa

SEQ ID NO: 78395 - DNA, 15 bp, Homo sapiens
tcatgttgcagcaat

SEQ ID NO: 78396 - DNA, 15 bp, Homo sapiens
catgttgcagcaatt

SEQ ID NO: 78397 - DNA, 15 bp, Homo sapiens
atgttgcagcaattc

SEQ ID NO: 78398 - DNA, 15 bp, Homo sapiens
tgttgcagcaattca

SEQ ID NO: 78399 - DNA, 15 bp, Homo sapiens
gttgcagcaattcac

SEQ ID NO: 78400 - DNA, 15 bp, Homo sapiens
ttgcagcaattcact

SEQ ID NO: 78401 - DNA, 15 bp, Homo sapiens
tgcagcaattcactg

SEQ ID NO: 78402 - DNA, 15 bp, Homo sapiens
gcagcaattcactgt

SEQ ID NO: 78403 - DNA, 15 bp, Homo sapiens
cagcaattcactgta

SEQ ID NO: 78404 - DNA, 15 bp, Homo sapiens
agcaattcactgtaa

SEQ ID NO: 78405 - DNA, 15 bp, Homo sapiens
gcaattcactgtaaa

SEQ ID NO: 78406 - DNA, 15 bp, Homo sapiens
caattcactgtaaag

SEQ ID NO: 78407 - DNA, 15 bp, Homo sapiens
aattcactgtaaagc

SEQ ID NO: 78408 - DNA, 15 bp, Homo sapiens
attcactgtaaagct

SEQ ID NO: 78409 - DNA, 15 bp, Homo sapiens
ttcactgtaaagctg

SEQ ID NO: 78410 - DNA, 15 bp, Homo sapiens
tcactgtaaagctgg

SEQ ID NO: 78411 - DNA, 15 bp, Homo sapiens
cactgtaaagctgga

SEQ ID NO: 78412 - DNA, 15 bp, Homo sapiens
actgtaaagctggaa

SEQ ID NO: 78413 - DNA, 15 bp, Homo sapiens
ctgtaaagctggaaa

SEQ ID NO: 78414 - DNA, 15 bp, Homo sapiens
tgtaaagctggaaag

SEQ ID NO: 78415 - DNA, 15 bp, Homo sapiens
gtaaagctggaaagg

SEQ ID NO: 78416 - DNA, 15 bp, Homo sapiens
taaagctggaaaggg

SEQ ID NO: 78417 - DNA, 15 bp, Homo sapiens
aaagctggaaaggga

SEQ ID NO: 78418 - DNA, 15 bp, Homo sapiens
aagctggaaagggac

SEQ ID NO: 78419 - DNA, 15 bp, Homo sapiens
agctggaaagggacg

SEQ ID NO: 78420 - DNA, 15 bp, Homo sapiens
gctggaaagggacga

SEQ ID NO: 78421 - DNA, 15 bp, Homo sapiens
ctggaaagggacgaa

SEQ ID NO: 78422 - DNA, 15 bp, Homo sapiens
tggaaagggacgaac

SEQ ID NO: 78423 - DNA, 15 bp, Homo sapiens
ggaaagggacgaact

SEQ ID NO: 78424 - DNA, 15 bp, Homo sapiens
gaaagggacgaactg

SEQ ID NO: 78425 - DNA, 15 bp, Homo sapiens
aaagggacgaactgg

SEQ ID NO: 78426 - DNA, 15 bp, Homo sapiens
aagggacgaactggt

SEQ ID NO: 78427 - DNA, 15 bp, Homo sapiens
agggacgaactggtg

SEQ ID NO: 78428 - DNA, 15 bp, Homo sapiens
gggacgaactggtgt

SEQ ID NO: 78429 - DNA, 15 bp, Homo sapiens
ggacgaactggtgta

SEQ ID NO: 78430 - DNA, 15 bp, Homo sapiens
gacgaactggtgtaa

SEQ ID NO: 78431 - DNA, 15 bp, Homo sapiens
acgaactggtgtaat

SEQ ID NO: 78432 - DNA, 15 bp, Homo sapiens
cgaactggtgtaatg

SEQ ID NO: 78433 - DNA, 15 bp, Homo sapiens
gaactggtgtaatga

SEQ ID NO: 78434 - DNA, 15 bp, Homo sapiens
aactggtgtaatgat

SEQ ID NO: 78435 - DNA, 15 bp, Homo sapiens
actggtgtaatgata

SEQ ID NO: 78436 - DNA, 15 bp, Homo sapiens
ctggtgtaatgatat

SEQ ID NO: 78437 - DNA, 15 bp, Homo sapiens
tggtgtaatgatatg

SEQ ID NO: 78438 - DNA, 15 bp, Homo sapiens
ggtgtaatgatatgt

SEQ ID NO: 78439 - DNA, 15 bp, Homo sapiens
gtgtaatgatatgtg

SEQ ID NO: 78440 - DNA, 15 bp, Homo sapiens
tgtaatgatatgtgc

SEQ ID NO: 78441 - DNA, 15 bp, Homo sapiens
gtaatgatatgtgca

SEQ ID NO: 78442 - DNA, 15 bp, Homo sapiens
taatgatatgtgcat

SEQ ID NO: 78443 - DNA, 15 bp, Homo sapiens
aatgatatgtgcata

SEQ ID NO: 78444 - DNA, 15 bp, Homo sapiens
atgatatgtgcatat

SEQ ID NO: 78445 - DNA, 15 bp, Homo sapiens
tgatatgtgcatatt

SEQ ID NO: 78446 - DNA, 15 bp, Homo sapiens
gatatgtgcatattt

SEQ ID NO: 78447 - DNA, 15 bp, Homo sapiens
atatgtgcatattta

SEQ ID NO: 78448 - DNA, 15 bp, Homo sapiens
tatgtgcatatttat

SEQ ID NO: 78449 - DNA, 15 bp, Homo sapiens
atgtgcatatttatt

SEQ ID NO: 78450 - DNA, 15 bp, Homo sapiens
tgtgcatatttatta

SEQ ID NO: 78451 - DNA, 15 bp, Homo sapiens
gtgcatatttattac

SEQ ID NO: 78452 - DNA, 15 bp, Homo sapiens
tgcatatttattaca

SEQ ID NO: 78453 - DNA, 15 bp, Homo sapiens
gcatatttattacat

SEQ ID NO: 78454 - DNA, 15 bp, Homo sapiens
catatttattacatc

SEQ ID NO: 78455 - DNA, 15 bp, Homo sapiens
atatttattacatcg

SEQ ID NO: 78456 - DNA, 15 bp, Homo sapiens
tatttattacatcgg

SEQ ID NO: 78457 - DNA, 15 bp, Homo sapiens
atttattacatcggg

SEQ ID NO: 78458 - DNA, 15 bp, Homo sapiens
tttattacatcgggg

SEQ ID NO: 78459 - DNA, 15 bp, Homo sapiens
ttattacatcggggc

SEQ ID NO: 78460 - DNA, 15 bp, Homo sapiens
tattacatcggggca

SEQ ID NO: 78461 - DNA, 15 bp, Homo sapiens
attacatcggggcaa

SEQ ID NO: 78462 - DNA, 15 bp, Homo sapiens
ttacatcggggcaaa

SEQ ID NO: 78463 - DNA, 15 bp, Homo sapiens
tacatcggggcaaat

SEQ ID NO: 78464 - DNA, 15 bp, Homo sapiens
acatcggggcaaatt

SEQ ID NO: 78465 - DNA, 15 bp, Homo sapiens
catcggggcaaattt

SEQ ID NO: 78466 - DNA, 15 bp, Homo sapiens
atcggggcaaatttt

SEQ ID NO: 78467 - DNA, 15 bp, Homo sapiens
tcggggcaaattttt

SEQ ID NO: 78468 - DNA, 15 bp, Homo sapiens
cggggcaaattttta

SEQ ID NO: 78469 - DNA, 15 bp, Homo sapiens
ggggcaaatttttaa

SEQ ID NO: 78470 - DNA, 15 bp, Homo sapiens
gggcaaatttttaaa

SEQ ID NO: 78471 - DNA, 15 bp, Homo sapiens
ggcaaatttttaaag

SEQ ID NO: 78472 - DNA, 15 bp, Homo sapiens
gcaaatttttaaagg

SEQ ID NO: 78473 - DNA, 15 bp, Homo sapiens
caaatttttaaaggc

SEQ ID NO: 78474 - DNA, 15 bp, Homo sapiens
aaatttttaaaggca

SEQ ID NO: 78475 - DNA, 15 bp, Homo sapiens
aatttttaaaggcac

SEQ ID NO: 78476 - DNA, 15 bp, Homo sapiens
atttttaaaggcaca

SEQ ID NO: 78477 - DNA, 15 bp, Homo sapiens
tttttaaaggcacaa

SEQ ID NO: 78478 - DNA, 15 bp, Homo sapiens
ttttaaaggcacaag

SEQ ID NO: 78479 - DNA, 15 bp, Homo sapiens
tttaaaggcacaaga

SEQ ID NO: 78480 - DNA, 15 bp, Homo sapiens
ttaaaggcacaagag

SEQ ID NO: 78481 - DNA, 15 bp, Homo sapiens
taaaggcacaagagg

SEQ ID NO: 78482 - DNA, 15 bp, Homo sapiens
aaaggcacaagaggc

SEQ ID NO: 78483 - DNA, 15 bp, Homo sapiens
aaggcacaagaggcc

SEQ ID NO: 78484 - DNA, 15 bp, Homo sapiens
aggcacaagaggccc

SEQ ID NO: 78485 - DNA, 15 bp, Homo sapiens
ggcacaagaggccct

SEQ ID NO: 78486 - DNA, 15 bp, Homo sapiens
gcacaagaggcccta

SEQ ID NO: 78487 - DNA, 15 bp, Homo sapiens
cacaagaggccctag

SEQ ID NO: 78488 - DNA, 15 bp, Homo sapiens
acaagaggccctaga

SEQ ID NO: 78489 - DNA, 15 bp, Homo sapiens
caagaggccctagat

SEQ ID NO: 78490 - DNA, 15 bp, Homo sapiens
aagaggccctagatt

SEQ ID NO: 78491 - DNA, 15 bp, Homo sapiens
agaggccctagattt

SEQ ID NO: 78492 - DNA, 15 bp, Homo sapiens
gaggccctagatttc

SEQ ID NO: 78493 - DNA, 15 bp, Homo sapiens
aggccctagatttct

SEQ ID NO: 78494 - DNA, 15 bp, Homo sapiens
ggccctagatttcta

SEQ ID NO: 78495 - DNA, 15 bp, Homo sapiens
gccctagatttctat

SEQ ID NO: 78496 - DNA, 15 bp, Homo sapiens
ccctagatttctatg

SEQ ID NO: 78497 - DNA, 15 bp, Homo sapiens
cctagatttctatgg

SEQ ID NO: 78498 - DNA, 15 bp, Homo sapiens
ctagatttctatggg

SEQ ID NO: 78499 - DNA, 15 bp, Homo sapiens
tagatttctatgggg

SEQ ID NO: 78500 - DNA, 15 bp, Homo sapiens
agatttctatgggga

SEQ ID NO: 78501 - DNA, 15 bp, Homo sapiens
gatttctatggggaa

SEQ ID NO: 78502 - DNA, 15 bp, Homo sapiens
atttctatggggaag

SEQ ID NO: 78503 - DNA, 15 bp, Homo sapiens
tttctatggggaagt

SEQ ID NO: 78504 - DNA, 15 bp, Homo sapiens
ttctatggggaagta

SEQ ID NO: 78505 - DNA, 15 bp, Homo sapiens
tctatggggaagtaa

SEQ ID NO: 78506 - DNA, 15 bp, Homo sapiens
ctatggggaagtaag

SEQ ID NO: 78507 - DNA, 15 bp, Homo sapiens
tatggggaagtaagg

SEQ ID NO: 78508 - DNA, 15 bp, Homo sapiens
atggggaagtaagga

SEQ ID NO: 78509 - DNA, 15 bp, Homo sapiens
tggggaagtaaggac

SEQ ID NO: 78510 - DNA, 15 bp, Homo sapiens
ggggaagtaaggacc

SEQ ID NO: 78511 - DNA, 15 bp, Homo sapiens
gggaagtaaggacca

SEQ ID NO: 78512 - DNA, 15 bp, Homo sapiens
ggaagtaaggaccag

SEQ ID NO: 78513 - DNA, 15 bp, Homo sapiens
gaagtaaggaccaga

SEQ ID NO: 78514 - DNA, 15 bp, Homo sapiens
aagtaaggaccagag

SEQ ID NO: 78515 - DNA, 15 bp, Homo sapiens
agtaaggaccagaga

SEQ ID NO: 78516 - DNA, 15 bp, Homo sapiens
gtaaggaccagagac

SEQ ID NO: 78517 - DNA, 15 bp, Homo sapiens
taaggaccagagaca

SEQ ID NO: 78518 - DNA, 15 bp, Homo sapiens
aaggaccagagacaa

SEQ ID NO: 78519 - DNA, 15 bp, Homo sapiens
aggaccagagacaaa

SEQ ID NO: 78520 - DNA, 15 bp, Homo sapiens
ggaccagagacaaaa

SEQ ID NO: 78521 - DNA, 15 bp, Homo sapiens
gaccagagacaaaaa

SEQ ID NO: 78522 - DNA, 15 bp, Homo sapiens
accagagacaaaaag

SEQ ID NO: 78523 - DNA, 15 bp, Homo sapiens
ccagagacaaaaagg

SEQ ID NO: 78524 - DNA, 15 bp, Homo sapiens
cagagacaaaaaggt

SEQ ID NO: 78525 - DNA, 15 bp, Homo sapiens
agagacaaaaaggta

SEQ ID NO: 78526 - DNA, 15 bp, Homo sapiens
gagacaaaaaggtaa

SEQ ID NO: 78527 - DNA, 15 bp, Homo sapiens
agacaaaaaggtaag

SEQ ID NO: 78528 - DNA, 15 bp, Homo sapiens
gacaaaaaggtaagt

SEQ ID NO: 78529 - DNA, 15 bp, Homo sapiens
acaaaaaggtaagtt

SEQ ID NO: 78530 - DNA, 15 bp, Homo sapiens
caaaaaggtaagtta

SEQ ID NO: 78531 - DNA, 15 bp, Homo sapiens
aaaaaggtaagttat

SEQ ID NO: 78532 - DNA, 15 bp, Homo sapiens
aaaaggtaagttatt

SEQ ID NO: 78533 - DNA, 15 bp, Homo sapiens
aaaggtaagttattt

SEQ ID NO: 78534 - DNA, 15 bp, Homo sapiens
aaggtaagttatttt

SEQ ID NO: 78535 - DNA, 15 bp, Homo sapiens
aggtaagttattttt

SEQ ID NO: 78536 - DNA, 15 bp, Homo sapiens
ggtaagttatttttt

SEQ ID NO: 78537 - DNA, 15 bp, Homo sapiens
gtaagttattttttg

SEQ ID NO: 78538 - DNA, 15 bp, Homo sapiens
taagttattttttga

SEQ ID NO: 78539 - DNA, 15 bp, Homo sapiens
aagttattttttgat

SEQ ID NO: 78540 - DNA, 15 bp, Homo sapiens
agttattttttgatg

SEQ ID NO: 78541 - DNA, 15 bp, Homo sapiens
gttattttttgatgt

SEQ ID NO: 78542 - DNA, 15 bp, Homo sapiens
ttattttttgatgtt

SEQ ID NO: 78543 - DNA, 15 bp, Homo sapiens
tattttttgatgttt

SEQ ID NO: 78544 - DNA, 15 bp, Homo sapiens
attttttgatgtttt

SEQ ID NO: 78545 - DNA, 15 bp, Homo sapiens
ttttttgatgttttt

SEQ ID NO: 78546 - DNA, 15 bp, Homo sapiens
tttttgatgtttttc

SEQ ID NO: 78547 - DNA, 15 bp, Homo sapiens
ttttgatgtttttcc

SEQ ID NO: 78548 - DNA, 15 bp, Homo sapiens
tttgatgtttttcct

SEQ ID NO: 78549 - DNA, 15 bp, Homo sapiens
ttgatgtttttcctt

SEQ ID NO: 78550 - DNA, 15 bp, Homo sapiens
tgatgtttttccttt

SEQ ID NO: 78551 - DNA, 15 bp, Homo sapiens
gatgtttttcctttc

SEQ ID NO: 78552 - DNA, 15 bp, Homo sapiens
atgtttttcctttcc

SEQ ID NO: 78553 - DNA, 15 bp, Homo sapiens
tgtttttcctttcct

SEQ ID NO: 78554 - DNA, 15 bp, Homo sapiens
gtttttcctttcctc

SEQ ID NO: 78555 - DNA, 15 bp, Homo sapiens
tttttcctttcctct

SEQ ID NO: 78556 - DNA, 15 bp, Homo sapiens
ttttcctttcctctt

SEQ ID NO: 78557 - DNA, 15 bp, Homo sapiens
tttcctttcctcttc

SEQ ID NO: 78558 - DNA, 15 bp, Homo sapiens
ttcctttcctcttcc

SEQ ID NO: 78559 - DNA, 15 bp, Homo sapiens
tcctttcctcttcct

SEQ ID NO: 78560 - DNA, 15 bp, Homo sapiens
cctttcctcttcctg

SEQ ID NO: 78561 - DNA, 15 bp, Homo sapiens
ctttcctcttcctgg

SEQ ID NO: 78562 - DNA, 15 bp, Homo sapiens
tttcctcttcctgga

SEQ ID NO: 78563 - DNA, 15 bp, Homo sapiens
ttcctcttcctggat

SEQ ID NO: 78564 - DNA, 15 bp, Homo sapiens
tcctcttcctggatc

SEQ ID NO: 78565 - DNA, 15 bp, Homo sapiens
cctcttcctggatct

SEQ ID NO: 78566 - DNA, 15 bp, Homo sapiens
ctcttcctggatctg

SEQ ID NO: 78567 - DNA, 15 bp, Homo sapiens
tcttcctggatctga

SEQ ID NO: 78568 - DNA, 15 bp, Homo sapiens
cttcctggatctgag

SEQ ID NO: 78569 - DNA, 15 bp, Homo sapiens
ttcctggatctgaga

SEQ ID NO: 78570 - DNA, 15 bp, Homo sapiens
tcctggatctgagaa

SEQ ID NO: 78571 - DNA, 15 bp, Homo sapiens
cctggatctgagaat

SEQ ID NO: 78572 - DNA, 15 bp, Homo sapiens
ctggatctgagaatt

SEQ ID NO: 78573 - DNA, 15 bp, Homo sapiens
tggatctgagaattt

SEQ ID NO: 78574 - DNA, 15 bp, Homo sapiens
ggatctgagaattta

SEQ ID NO: 78575 - DNA, 15 bp, Homo sapiens
gatctgagaatttat

SEQ ID NO: 78576 - DNA, 15 bp, Homo sapiens
atctgagaatttatt

SEQ ID NO: 78577 - DNA, 15 bp, Homo sapiens
tctgagaatttattg

SEQ ID NO: 78578 - DNA, 15 bp, Homo sapiens
ctgagaatttattgg

SEQ ID NO: 78579 - DNA, 15 bp, Homo sapiens
tgagaatttattgga

SEQ ID NO: 78580 - DNA, 15 bp, Homo sapiens
gagaatttattggaa

SEQ ID NO: 78581 - DNA, 15 bp, Homo sapiens
atttattggaaaaca

SEQ ID NO: 78582 - DNA, 15 bp, Homo sapiens
tttattggaaaacag

SEQ ID NO: 78583 - DNA, 15 bp, Homo sapiens
ttattggaaaacaga

SEQ ID NO: 78584 - DNA, 15 bp, Homo sapiens
tattggaaaacagat

SEQ ID NO: 78585 - DNA, 15 bp, Homo sapiens
attggaaaacagatt

SEQ ID NO: 78586 - DNA, 15 bp, Homo sapiens
ttggaaaacagattt

SEQ ID NO: 78587 - DNA, 15 bp, Homo sapiens
tggaaaacagatttt

SEQ ID NO: 78588 - DNA, 15 bp, Homo sapiens
ggaaaacagattttg

SEQ ID NO: 78589 - DNA, 15 bp, Homo sapiens
gaaaacagattttgg

SEQ ID NO: 78590 - DNA, 15 bp, Homo sapiens
aaaacagattttggg

SEQ ID NO: 78591 - DNA, 15 bp, Homo sapiens
aaacagattttgggt

SEQ ID NO: 78592 - DNA, 15 bp, Homo sapiens
aacagattttgggtt

SEQ ID NO: 78593 - DNA, 15 bp, Homo sapiens
acagattttgggttt

SEQ ID NO: 78594 - DNA, 15 bp, Homo sapiens
cagattttgggtttc

SEQ ID NO: 78595 - DNA, 15 bp, Homo sapiens
agattttgggtttct

SEQ ID NO: 78596 - DNA, 15 bp, Homo sapiens
gattttgggtttctt

SEQ ID NO: 78597 - DNA, 15 bp, Homo sapiens
attttgggtttcttt

SEQ ID NO: 78598 - DNA, 15 bp, Homo sapiens
ttttgggtttctttt

SEQ ID NO: 78599 - DNA, 15 bp, Homo sapiens
tttgggtttcttttt

SEQ ID NO: 78600 - DNA, 15 bp, Homo sapiens
ttgggtttctttttt

SEQ ID NO: 78601 - DNA, 15 bp, Homo sapiens
tgggtttcttttttt

SEQ ID NO: 78602 - DNA, 15 bp, Homo sapiens
gggtttctttttttc

SEQ ID NO: 78603 - DNA, 15 bp, Homo sapiens
ggtttctttttttcc

SEQ ID NO: 78604 - DNA, 15 bp, Homo sapiens
gtttctttttttcct

SEQ ID NO: 78605 - DNA, 15 bp, Homo sapiens
tttctttttttcctt

SEQ ID NO: 78606 - DNA, 15 bp, Homo sapiens
ttctttttttccttc

SEQ ID NO: 78607 - DNA, 15 bp, Homo sapiens
tctttttttccttca

SEQ ID NO: 78608 - DNA, 15 bp, Homo sapiens
ctttttttccttcag

SEQ ID NO: 78609 - DNA, 15 bp, Homo sapiens
tttttttccttcagt

SEQ ID NO: 78610 - DNA, 15 bp, Homo sapiens
ttttttccttcagtt

SEQ ID NO: 78611 - DNA, 15 bp, Homo sapiens
tttttccttcagttt

SEQ ID NO: 78612 - DNA, 15 bp, Homo sapiens
tttccttcagtttta

SEQ ID NO: 78613 - DNA, 15 bp, Homo sapiens
ttccttcagttttat

SEQ ID NO: 78614 - DNA, 15 bp, Homo sapiens
tccttcagttttatt

SEQ ID NO: 78615 - DNA, 15 bp, Homo sapiens
ccttcagttttattg

SEQ ID NO: 78616 - DNA, 15 bp, Homo sapiens
cttcagttttattga

SEQ ID NO: 78617 - DNA, 15 bp, Homo sapiens
ttcagttttattgag

SEQ ID NO: 78618 - DNA, 15 bp, Homo sapiens
tcagttttattgagg

SEQ ID NO: 78619 - DNA, 15 bp, Homo sapiens
cagttttattgaggt

SEQ ID NO: 78620 - DNA, 15 bp, Homo sapiens
agttttattgaggtg

SEQ ID NO: 78621 - DNA, 15 bp, Homo sapiens
gttttattgaggtgt

SEQ ID NO: 78622 - DNA, 15 bp, Homo sapiens
ttttattgaggtgta

SEQ ID NO: 78623 - DNA, 15 bp, Homo sapiens
tttattgaggtgtaa

SEQ ID NO: 78624 - DNA, 15 bp, Homo sapiens
ttattgaggtgtaat

SEQ ID NO: 78625 - DNA, 15 bp, Homo sapiens
tattgaggtgtaatt

SEQ ID NO: 78626 - DNA, 15 bp, Homo sapiens
attgaggtgtaattg

SEQ ID NO: 78627 - DNA, 15 bp, Homo sapiens
ttgaggtgtaattga

SEQ ID NO: 78628 - DNA, 15 bp, Homo sapiens
tgaggtgtaattgac

SEQ ID NO: 78629 - DNA, 15 bp, Homo sapiens
gaggtgtaattgaca

SEQ ID NO: 78630 - DNA, 15 bp, Homo sapiens
aggtgtaattgacaa

SEQ ID NO: 78631 - DNA, 15 bp, Homo sapiens
ggtgtaattgacaag

SEQ ID NO: 78632 - DNA, 15 bp, Homo sapiens
gtgtaattgacaagt

SEQ ID NO: 78633 - DNA, 15 bp, Homo sapiens
tgtaattgacaagta

SEQ ID NO: 78634 - DNA, 15 bp, Homo sapiens
gtaattgacaagtaa

SEQ ID NO: 78635 - DNA, 15 bp, Homo sapiens
taattgacaagtaaa

SEQ ID NO: 78636 - DNA, 15 bp, Homo sapiens
aattgacaagtaaaa

SEQ ID NO: 78637 - DNA, 15 bp, Homo sapiens
attgacaagtaaaaa

SEQ ID NO: 78638 - DNA, 15 bp, Homo sapiens
ttgacaagtaaaaat

SEQ ID NO: 78639 - DNA, 15 bp, Homo sapiens
tgacaagtaaaaatt

SEQ ID NO: 78640 - DNA, 15 bp, Homo sapiens
gacaagtaaaaatta

SEQ ID NO: 78641 - DNA, 15 bp, Homo sapiens
acaagtaaaaattat

SEQ ID NO: 78642 - DNA, 15 bp, Homo sapiens
caagtaaaaattata

SEQ ID NO: 78643 - DNA, 15 bp, Homo sapiens
aagtaaaaattatat

SEQ ID NO: 78644 - DNA, 15 bp, Homo sapiens
agtaaaaattatata

SEQ ID NO: 78645 - DNA, 15 bp, Homo sapiens
gtaaaaattatatat

SEQ ID NO: 78646 - DNA, 15 bp, Homo sapiens
taaaaattatatata

SEQ ID NO: 78647 - DNA, 15 bp, Homo sapiens
aaaaattatatataa

SEQ ID NO: 78648 - DNA, 15 bp, Homo sapiens
aaaattatatataaa

SEQ ID NO: 78649 - DNA, 15 bp, Homo sapiens
aaattatatataaat

SEQ ID NO: 78650 - DNA, 15 bp, Homo sapiens
aattatatataaata

SEQ ID NO: 78651 - DNA, 15 bp, Homo sapiens
attatatataaatac

SEQ ID NO: 78652 - DNA, 15 bp, Homo sapiens
ttatatataaataca

SEQ ID NO: 78653 - DNA, 15 bp, Homo sapiens
tatatataaatacaa

SEQ ID NO: 78654 - DNA, 15 bp, Homo sapiens
atatataaatacaat

SEQ ID NO: 78655 - DNA, 15 bp, Homo sapiens
tatataaatacaatg

SEQ ID NO: 78656 - DNA, 15 bp, Homo sapiens
atataaatacaatgt

SEQ ID NO: 78657 - DNA, 15 bp, Homo sapiens
tataaatacaatgta

SEQ ID NO: 78658 - DNA, 15 bp, Homo sapiens
ataaatacaatgtat

SEQ ID NO: 78659 - DNA, 15 bp, Homo sapiens
taaatacaatgtata

SEQ ID NO: 78660 - DNA, 15 bp, Homo sapiens
aaatacaatgtataa

SEQ ID NO: 78661 - DNA, 15 bp, Homo sapiens
aatacaatgtataat

SEQ ID NO: 78662 - DNA, 15 bp, Homo sapiens
atacaatgtataata

SEQ ID NO: 78663 - DNA, 15 bp, Homo sapiens
tacaatgtataatat

SEQ ID NO: 78664 - DNA, 15 bp, Homo sapiens
acaatgtataatatg

SEQ ID NO: 78665 - DNA, 15 bp, Homo sapiens
caatgtataatatga

SEQ ID NO: 78666 - DNA, 15 bp, Homo sapiens
aatgtataatatgat

SEQ ID NO: 78667 - DNA, 15 bp, Homo sapiens
atgtataatatgatg

SEQ ID NO: 78668 - DNA, 15 bp, Homo sapiens
tgtataatatgatgt

SEQ ID NO: 78669 - DNA, 15 bp, Homo sapiens
gtataatatgatgtt

SEQ ID NO: 78670 - DNA, 15 bp, Homo sapiens
tataatatgatgttt

SEQ ID NO: 78671 - DNA, 15 bp, Homo sapiens
ataatatgatgtttt

SEQ ID NO: 78672 - DNA, 15 bp, Homo sapiens
taatatgatgttttg

SEQ ID NO: 78673 - DNA, 15 bp, Homo sapiens
aatatgatgttttga

SEQ ID NO: 78674 - DNA, 15 bp, Homo sapiens
atatgatgttttgat

SEQ ID NO: 78675 - DNA, 15 bp, Homo sapiens
tatgatgttttgatg

SEQ ID NO: 78676 - DNA, 15 bp, Homo sapiens
atgatgttttgatgt

SEQ ID NO: 78677 - DNA, 15 bp, Homo sapiens
tgatgttttgatgta

SEQ ID NO: 78678 - DNA, 15 bp, Homo sapiens
gatgttttgatgtat

SEQ ID NO: 78679 - DNA, 15 bp, Homo sapiens
atgttttgatgtatg

SEQ ID NO: 78680 - DNA, 15 bp, Homo sapiens
tgttttgatgtatgt

SEQ ID NO: 78681 - DNA, 15 bp, Homo sapiens
gttttgatgtatgtg

SEQ ID NO: 78682 - DNA, 15 bp, Homo sapiens
ttttgatgtatgtgt

SEQ ID NO: 78683 - DNA, 15 bp, Homo sapiens
tttgatgtatgtgta

SEQ ID NO: 78684 - DNA, 15 bp, Homo sapiens
ttgatgtatgtgtat

SEQ ID NO: 78685 - DNA, 15 bp, Homo sapiens
tgatgtatgtgtata

SEQ ID NO: 78686 - DNA, 15 bp, Homo sapiens
gatgtatgtgtatat

SEQ ID NO: 78687 - DNA, 15 bp, Homo sapiens
atgtatgtgtatata

SEQ ID NO: 78688 - DNA, 15 bp, Homo sapiens
tgtatgtgtatatac

SEQ ID NO: 78689 - DNA, 15 bp, Homo sapiens
gtatgtgtatataca

SEQ ID NO: 78690 - DNA, 15 bp, Homo sapiens
tatgtgtatatacat

SEQ ID NO: 78691 - DNA, 15 bp, Homo sapiens
atgtgtatatacatt

SEQ ID NO: 78692 - DNA, 15 bp, Homo sapiens
tgtgtatatacattg

SEQ ID NO: 78693 - DNA, 15 bp, Homo sapiens
gtgtatatacattgt

SEQ ID NO: 78694 - DNA, 15 bp, Homo sapiens
tgtatatacattgtg

SEQ ID NO: 78695 - DNA, 15 bp, Homo sapiens
gtatatacattgtga

SEQ ID NO: 78696 - DNA, 15 bp, Homo sapiens
tatatacattgtgaa

SEQ ID NO: 78697 - DNA, 15 bp, Homo sapiens
atatacattgtgaaa

SEQ ID NO: 78698 - DNA, 15 bp, Homo sapiens
tatacattgtgaaat

SEQ ID NO: 78699 - DNA, 15 bp, Homo sapiens
atacattgtgaaatg

SEQ ID NO: 78700 - DNA, 15 bp, Homo sapiens
tacattgtgaaatga

SEQ ID NO: 78701 - DNA, 15 bp, Homo sapiens
acattgtgaaatgat

SEQ ID NO: 78702 - DNA, 15 bp, Homo sapiens
cattgtgaaatgatt

SEQ ID NO: 78703 - DNA, 15 bp, Homo sapiens
attgtgaaatgatta

SEQ ID NO: 78704 - DNA, 15 bp, Homo sapiens
ttgtgaaatgattac

SEQ ID NO: 78705 - DNA, 15 bp, Homo sapiens
tgtgaaatgattact

SEQ ID NO: 78706 - DNA, 15 bp, Homo sapiens
gtgaaatgattacta

SEQ ID NO: 78707 - DNA, 15 bp, Homo sapiens
tgaaatgattactac

SEQ ID NO: 78708 - DNA, 15 bp, Homo sapiens
gaaatgattactaca

SEQ ID NO: 78709 - DNA, 15 bp, Homo sapiens
aaatgattactacag

SEQ ID NO: 78710 - DNA, 15 bp, Homo sapiens
aatgattactacagt

SEQ ID NO: 78711 - DNA, 15 bp, Homo sapiens
atgattactacagtc

SEQ ID NO: 78712 - DNA, 15 bp, Homo sapiens
tgattactacagtca

SEQ ID NO: 78713 - DNA, 15 bp, Homo sapiens
gattactacagtcaa

SEQ ID NO: 78714 - DNA, 15 bp, Homo sapiens
attactacagtcaaa

SEQ ID NO: 78715 - DNA, 15 bp, Homo sapiens
ttactacagtcaaac

SEQ ID NO: 78716 - DNA, 15 bp, Homo sapiens
tactacagtcaaact

SEQ ID NO: 78717 - DNA, 15 bp, Homo sapiens
actacagtcaaacta

SEQ ID NO: 78718 - DNA, 15 bp, Homo sapiens
ctacagtcaaactac

SEQ ID NO: 78719 - DNA, 15 bp, Homo sapiens
tacagtcaaactact

SEQ ID NO: 78720 - DNA, 15 bp, Homo sapiens
acagtcaaactactt

SEQ ID NO: 78721 - DNA, 15 bp, Homo sapiens
cagtcaaactactta

SEQ ID NO: 78722 - DNA, 15 bp, Homo sapiens
agtcaaactacttaa

SEQ ID NO: 78723 - DNA, 15 bp, Homo sapiens
gtcaaactacttaac

SEQ ID NO: 78724 - DNA, 15 bp, Homo sapiens
tcaaactacttaaca

SEQ ID NO: 78725 - DNA, 15 bp, Homo sapiens
caaactacttaacat

SEQ ID NO: 78726 - DNA, 15 bp, Homo sapiens
aaactacttaacata

SEQ ID NO: 78727 - DNA, 15 bp, Homo sapiens
aactacttaacatat

SEQ ID NO: 78728 - DNA, 15 bp, Homo sapiens
actacttaacatatt

SEQ ID NO: 78729 - DNA, 15 bp, Homo sapiens
ctacttaacatattc

SEQ ID NO: 78730 - DNA, 15 bp, Homo sapiens
tacttaacatattca

SEQ ID NO: 78731 - DNA, 15 bp, Homo sapiens
acttaacatattcat

SEQ ID NO: 78732 - DNA, 15 bp, Homo sapiens
cttaacatattcatc

SEQ ID NO: 78733 - DNA, 15 bp, Homo sapiens
ttaacatattcatca

SEQ ID NO: 78734 - DNA, 15 bp, Homo sapiens
taacatattcatcac

SEQ ID NO: 78735 - DNA, 15 bp, Homo sapiens
aacatattcatcacc

SEQ ID NO: 78736 - DNA, 15 bp, Homo sapiens
acatattcatcacct

SEQ ID NO: 78737 - DNA, 15 bp, Homo sapiens
catattcatcacctc

SEQ ID NO: 78738 - DNA, 15 bp, Homo sapiens
atattcatcacctca

SEQ ID NO: 78739 - DNA, 15 bp, Homo sapiens
tattcatcacctcac

SEQ ID NO: 78740 - DNA, 15 bp, Homo sapiens
attcatcacctcaca

SEQ ID NO: 78741 - DNA, 15 bp, Homo sapiens
ttcatcacctcacat

SEQ ID NO: 78742 - DNA, 15 bp, Homo sapiens
tcatcacctcacata

SEQ ID NO: 78743 - DNA, 15 bp, Homo sapiens
catcacctcacataa

SEQ ID NO: 78744 - DNA, 15 bp, Homo sapiens
atcacctcacataat

SEQ ID NO: 78745 - DNA, 15 bp, Homo sapiens
tcacctcacataatt

SEQ ID NO: 78746 - DNA, 15 bp, Homo sapiens
cacctcacataatta

SEQ ID NO: 78747 - DNA, 15 bp, Homo sapiens
acctcacataattat

SEQ ID NO: 78748 - DNA, 15 bp, Homo sapiens
cctcacataattatt

SEQ ID NO: 78749 - DNA, 15 bp, Homo sapiens
ctcacataattatta

SEQ ID NO: 78750 - DNA, 15 bp, Homo sapiens
tcacataattattat

SEQ ID NO: 78751 - DNA, 15 bp, Homo sapiens
cacataattattatt

SEQ ID NO: 78752 - DNA, 15 bp, Homo sapiens
acataattattattc

SEQ ID NO: 78753 - DNA, 15 bp, Homo sapiens
cataattattattct

SEQ ID NO: 78754 - DNA, 15 bp, Homo sapiens
ataattattattctc

SEQ ID NO: 78755 - DNA, 15 bp, Homo sapiens
taattattattctcc

SEQ ID NO: 78756 - DNA, 15 bp, Homo sapiens
aattattattctccc

SEQ ID NO: 78757 - DNA, 15 bp, Homo sapiens
attattattctcccc

SEQ ID NO: 78758 - DNA, 15 bp, Homo sapiens
ttattattctccccc

SEQ ID NO: 78759 - DNA, 15 bp, Homo sapiens
tattattctcccccc

SEQ ID NO: 78760 - DNA, 15 bp, Homo sapiens
attattctcccccca

SEQ ID NO: 78761 - DNA, 15 bp, Homo sapiens
ttattctccccccag

SEQ ID NO: 78762 - DNA, 15 bp, Homo sapiens
tattctccccccagg

SEQ ID NO: 78763 - DNA, 15 bp, Homo sapiens
attctccccccaggg

SEQ ID NO: 78764 - DNA, 15 bp, Homo sapiens
ttctccccccagggt

SEQ ID NO: 78765 - DNA, 15 bp, Homo sapiens
tctccccccagggtg

SEQ ID NO: 78766 - DNA, 15 bp, Homo sapiens
ctccccccagggtga

SEQ ID NO: 78767 - DNA, 15 bp, Homo sapiens
tccccccagggtgaa

SEQ ID NO: 78768 - DNA, 15 bp, Homo sapiens
ccccccagggtgaaa

SEQ ID NO: 78769 - DNA, 15 bp, Homo sapiens
cccccagggtgaaag

SEQ ID NO: 78770 - DNA, 15 bp, Homo sapiens
ccccagggtgaaagc

SEQ ID NO: 78771 - DNA, 15 bp, Homo sapiens
cccagggtgaaagca

SEQ ID NO: 78772 - DNA, 15 bp, Homo sapiens
ccagggtgaaagcat

SEQ ID NO: 78773 - DNA, 15 bp, Homo sapiens
cagggtgaaagcatt

SEQ ID NO: 78774 - DNA, 15 bp, Homo sapiens
agggtgaaagcattt

SEQ ID NO: 78775 - DNA, 15 bp, Homo sapiens
gggtgaaagcattta

SEQ ID NO: 78776 - DNA, 15 bp, Homo sapiens
ggtgaaagcatttaa

SEQ ID NO: 78777 - DNA, 15 bp, Homo sapiens
gtgaaagcatttaag

SEQ ID NO: 78778 - DNA, 15 bp, Homo sapiens
tgaaagcatttaaga

SEQ ID NO: 78779 - DNA, 15 bp, Homo sapiens
gaaagcatttaagat

SEQ ID NO: 78780 - DNA, 15 bp, Homo sapiens
aaagcatttaagatc

SEQ ID NO: 78781 - DNA, 15 bp, Homo sapiens
aagcatttaagatct

SEQ ID NO: 78782 - DNA, 15 bp, Homo sapiens
agcatttaagatcta

SEQ ID NO: 78783 - DNA, 15 bp, Homo sapiens
gcatttaagatctac

SEQ ID NO: 78784 - DNA, 15 bp, Homo sapiens
catttaagatctaca

SEQ ID NO: 78785 - DNA, 15 bp, Homo sapiens
atttaagatctacaa

SEQ ID NO: 78786 - DNA, 15 bp, Homo sapiens
tttaagatctacaag

SEQ ID NO: 78787 - DNA, 15 bp, Homo sapiens
ttaagatctacaagc

SEQ ID NO: 78788 - DNA, 15 bp, Homo sapiens
taagatctacaagct

SEQ ID NO: 78789 - DNA, 15 bp, Homo sapiens
aagatctacaagcta

SEQ ID NO: 78790 - DNA, 15 bp, Homo sapiens
agatctacaagctac

SEQ ID NO: 78791 - DNA, 15 bp, Homo sapiens
gatctacaagctaca

SEQ ID NO: 78792 - DNA, 15 bp, Homo sapiens
atctacaagctacaa

SEQ ID NO: 78793 - DNA, 15 bp, Homo sapiens
tctacaagctacaat

SEQ ID NO: 78794 - DNA, 15 bp, Homo sapiens
ctacaagctacaatt

SEQ ID NO: 78795 - DNA, 15 bp, Homo sapiens
tacaagctacaattt

SEQ ID NO: 78796 - DNA, 15 bp, Homo sapiens
acaagctacaatttt

SEQ ID NO: 78797 - DNA, 15 bp, Homo sapiens
caagctacaattttc

SEQ ID NO: 78798 - DNA, 15 bp, Homo sapiens
aagctacaattttca

SEQ ID NO: 78799 - DNA, 15 bp, Homo sapiens
agctacaattttcaa

SEQ ID NO: 78800 - DNA, 15 bp, Homo sapiens
gctacaattttcaat

SEQ ID NO: 78801 - DNA, 15 bp, Homo sapiens
ctacaattttcaatt

SEQ ID NO: 78802 - DNA, 15 bp, Homo sapiens
tacaattttcaatta

SEQ ID NO: 78803 - DNA, 15 bp, Homo sapiens
acaattttcaattat

SEQ ID NO: 78804 - DNA, 15 bp, Homo sapiens
caattttcaattata

SEQ ID NO: 78805 - DNA, 15 bp, Homo sapiens
aattttcaattatac

SEQ ID NO: 78806 - DNA, 15 bp, Homo sapiens
attttcaattataca

SEQ ID NO: 78807 - DNA, 15 bp, Homo sapiens
ttttcaattatacaa

SEQ ID NO: 78808 - DNA, 15 bp, Homo sapiens
tttcaattatacaat

SEQ ID NO: 78809 - DNA, 15 bp, Homo sapiens
ttcaattatacaatg

SEQ ID NO: 78810 - DNA, 15 bp, Homo sapiens
tcaattatacaatgt

SEQ ID NO: 78811 - DNA, 15 bp, Homo sapiens
caattatacaatgtt

SEQ ID NO: 78812 - DNA, 15 bp, Homo sapiens
aattatacaatgtta

SEQ ID NO: 78813 - DNA, 15 bp, Homo sapiens
attatacaatgttat

SEQ ID NO: 78814 - DNA, 15 bp, Homo sapiens
ttatacaatgttatt

SEQ ID NO: 78815 - DNA, 15 bp, Homo sapiens
tatacaatgttatta

SEQ ID NO: 78816 - DNA, 15 bp, Homo sapiens
atacaatgttattat

SEQ ID NO: 78817 - DNA, 15 bp, Homo sapiens
tacaatgttattatt

SEQ ID NO: 78818 - DNA, 15 bp, Homo sapiens
acaatgttattatta

SEQ ID NO: 78819 - DNA, 15 bp, Homo sapiens
caatgttattattaa

SEQ ID NO: 78820 - DNA, 15 bp, Homo sapiens
aatgttattattaac

SEQ ID NO: 78821 - DNA, 15 bp, Homo sapiens
atgttattattaact

SEQ ID NO: 78822 - DNA, 15 bp, Homo sapiens
tgttattattaacta

SEQ ID NO: 78823 - DNA, 15 bp, Homo sapiens
gttattattaactat

SEQ ID NO: 78824 - DNA, 15 bp, Homo sapiens
ttattattaactata

SEQ ID NO: 78825 - DNA, 15 bp, Homo sapiens
tattattaactatag

SEQ ID NO: 78826 - DNA, 15 bp, Homo sapiens
attattaactatagt

SEQ ID NO: 78827 - DNA, 15 bp, Homo sapiens
ttattaactatagtc

SEQ ID NO: 78828 - DNA, 15 bp, Homo sapiens
tattaactatagtca

SEQ ID NO: 78829 - DNA, 15 bp, Homo sapiens
attaactatagtcac

SEQ ID NO: 78830 - DNA, 15 bp, Homo sapiens
ttaactatagtcact

SEQ ID NO: 78831 - DNA, 15 bp, Homo sapiens
taactatagtcacta

SEQ ID NO: 78832 - DNA, 15 bp, Homo sapiens
aactatagtcactat

SEQ ID NO: 78833 - DNA, 15 bp, Homo sapiens
actatagtcactatg

SEQ ID NO: 78834 - DNA, 15 bp, Homo sapiens
ctatagtcactatgc

SEQ ID NO: 78835 - DNA, 15 bp, Homo sapiens
tatagtcactatgct

SEQ ID NO: 78836 - DNA, 15 bp, Homo sapiens
atagtcactatgctg

SEQ ID NO: 78837 - DNA, 15 bp, Homo sapiens
tagtcactatgctgt

SEQ ID NO: 78838 - DNA, 15 bp, Homo sapiens
agtcactatgctgtc

SEQ ID NO: 78839 - DNA, 15 bp, Homo sapiens
gtcactatgctgtcc

SEQ ID NO: 78840 - DNA, 15 bp, Homo sapiens
tcactatgctgtcca

SEQ ID NO: 78841 - DNA, 15 bp, Homo sapiens
cactatgctgtccag

SEQ ID NO: 78842 - DNA, 15 bp, Homo sapiens
actatgctgtccagt

SEQ ID NO: 78843 - DNA, 15 bp, Homo sapiens
ctatgctgtccagta

SEQ ID NO: 78844 - DNA, 15 bp, Homo sapiens
tatgctgtccagtag

SEQ ID NO: 78845 - DNA, 15 bp, Homo sapiens
atgctgtccagtaga

SEQ ID NO: 78846 - DNA, 15 bp, Homo sapiens
tgctgtccagtagag

SEQ ID NO: 78847 - DNA, 15 bp, Homo sapiens
gctgtccagtagagc

SEQ ID NO: 78848 - DNA, 15 bp, Homo sapiens
ctgtccagtagagct

SEQ ID NO: 78849 - DNA, 15 bp, Homo sapiens
tgtccagtagagctt

SEQ ID NO: 78850 - DNA, 15 bp, Homo sapiens
gtccagtagagcttc

SEQ ID NO: 78851 - DNA, 15 bp, Homo sapiens
tccagtagagcttca

SEQ ID NO: 78852 - DNA, 15 bp, Homo sapiens
ccagtagagcttcag

SEQ ID NO: 78853 - DNA, 15 bp, Homo sapiens
cagtagagcttcaga

SEQ ID NO: 78854 - DNA, 15 bp, Homo sapiens
agtagagcttcagat

SEQ ID NO: 78855 - DNA, 15 bp, Homo sapiens
gtagagcttcagatc

SEQ ID NO: 78856 - DNA, 15 bp, Homo sapiens
tagagcttcagatct

SEQ ID NO: 78857 - DNA, 15 bp, Homo sapiens
agagcttcagatctt

SEQ ID NO: 78858 - DNA, 15 bp, Homo sapiens
gagcttcagatcttg

SEQ ID NO: 78859 - DNA, 15 bp, Homo sapiens
agcttcagatcttgt

SEQ ID NO: 78860 - DNA, 15 bp, Homo sapiens
gcttcagatcttgtt

SEQ ID NO: 78861 - DNA, 15 bp, Homo sapiens
cttcagatcttgttc

SEQ ID NO: 78862 - DNA, 15 bp, Homo sapiens
ttcagatcttgttca

SEQ ID NO: 78863 - DNA, 15 bp, Homo sapiens
tcagatcttgttcat

SEQ ID NO: 78864 - DNA, 15 bp, Homo sapiens
cagatcttgttcatc

SEQ ID NO: 78865 - DNA, 15 bp, Homo sapiens
agatcttgttcatct

SEQ ID NO: 78866 - DNA, 15 bp, Homo sapiens
gatcttgttcatctt

SEQ ID NO: 78867 - DNA, 15 bp, Homo sapiens
atcttgttcatcttg

SEQ ID NO: 78868 - DNA, 15 bp, Homo sapiens
tcttgttcatcttgt

SEQ ID NO: 78869 - DNA, 15 bp, Homo sapiens
cttgttcatcttgtg

SEQ ID NO: 78870 - DNA, 15 bp, Homo sapiens
ttgttcatcttgtgt

SEQ ID NO: 78871 - DNA, 15 bp, Homo sapiens
tgttcatcttgtgtt

SEQ ID NO: 78872 - DNA, 15 bp, Homo sapiens
gttcatcttgtgttc

SEQ ID NO: 78873 - DNA, 15 bp, Homo sapiens
ttcatcttgtgttcc

SEQ ID NO: 78874 - DNA, 15 bp, Homo sapiens
tcatcttgtgttcct

SEQ ID NO: 78875 - DNA, 15 bp, Homo sapiens
catcttgtgttcctc

SEQ ID NO: 78876 - DNA, 15 bp, Homo sapiens
atcttgtgttcctcc

SEQ ID NO: 78877 - DNA, 15 bp, Homo sapiens
tcttgtgttcctccc

SEQ ID NO: 78878 - DNA, 15 bp, Homo sapiens
cttgtgttcctccct

SEQ ID NO: 78879 - DNA, 15 bp, Homo sapiens
ttgtgttcctccctc

SEQ ID NO: 78880 - DNA, 15 bp, Homo sapiens
tgtgttcctccctcc

SEQ ID NO: 78881 - DNA, 15 bp, Homo sapiens
gtgttcctccctccc

SEQ ID NO: 78882 - DNA, 15 bp, Homo sapiens
tgttcctccctcccc

SEQ ID NO: 78883 - DNA, 15 bp, Homo sapiens
gttcctccctcccca

SEQ ID NO: 78884 - DNA, 15 bp, Homo sapiens
ttcctccctccccac

SEQ ID NO: 78885 - DNA, 15 bp, Homo sapiens
tcctccctccccacc

SEQ ID NO: 78886 - DNA, 15 bp, Homo sapiens
cctccctccccaccc

SEQ ID NO: 78887 - DNA, 15 bp, Homo sapiens
ctccctccccaccct

SEQ ID NO: 78888 - DNA, 15 bp, Homo sapiens
tccctccccaccctc

SEQ ID NO: 78889 - DNA, 15 bp, Homo sapiens
ccctccccaccctca

SEQ ID NO: 78890 - DNA, 15 bp, Homo sapiens
cctccccaccctcag

SEQ ID NO: 78891 - DNA, 15 bp, Homo sapiens
ctccccaccctcagt

SEQ ID NO: 78892 - DNA, 15 bp, Homo sapiens
tccccaccctcagtc

SEQ ID NO: 78893 - DNA, 15 bp, Homo sapiens
ccccaccctcagtcc

SEQ ID NO: 78894 - DNA, 15 bp, Homo sapiens
cccaccctcagtccc

SEQ ID NO: 78895 - DNA, 15 bp, Homo sapiens
ccaccctcagtccct

SEQ ID NO: 78896 - DNA, 15 bp, Homo sapiens
caccctcagtccctg

SEQ ID NO: 78897 - DNA, 15 bp, Homo sapiens
accctcagtccctgg

SEQ ID NO: 78898 - DNA, 15 bp, Homo sapiens
ccctcagtccctgga

SEQ ID NO: 78899 - DNA, 15 bp, Homo sapiens
cctcagtccctggaa

SEQ ID NO: 78900 - DNA, 15 bp, Homo sapiens
ctcagtccctggaaa

SEQ ID NO: 78901 - DNA, 15 bp, Homo sapiens
tcagtccctggaaaa

SEQ ID NO: 78902 - DNA, 15 bp, Homo sapiens
cagtccctggaaaac

SEQ ID NO: 78903 - DNA, 15 bp, Homo sapiens
agtccctggaaaaca

SEQ ID NO: 78904 - DNA, 15 bp, Homo sapiens
gtccctggaaaacag

SEQ ID NO: 78905 - DNA, 15 bp, Homo sapiens
tccctggaaaacagg

SEQ ID NO: 78906 - DNA, 15 bp, Homo sapiens
ccctggaaaacaggt

SEQ ID NO: 78907 - DNA, 15 bp, Homo sapiens
cctggaaaacaggtt

SEQ ID NO: 78908 - DNA, 15 bp, Homo sapiens
ctggaaaacaggttt

SEQ ID NO: 78909 - DNA, 15 bp, Homo sapiens
tggaaaacaggtttt

SEQ ID NO: 78910 - DNA, 15 bp, Homo sapiens
ggaaaacaggtttta

SEQ ID NO: 78911 - DNA, 15 bp, Homo sapiens
gaaaacaggttttaa

SEQ ID NO: 78912 - DNA, 15 bp, Homo sapiens
aaaacaggttttaaa

SEQ ID NO: 78913 - DNA, 15 bp, Homo sapiens
aaacaggttttaaag

SEQ ID NO: 78914 - DNA, 15 bp, Homo sapiens
aacaggttttaaaga

SEQ ID NO: 78915 - DNA, 15 bp, Homo sapiens
acaggttttaaagat

SEQ ID NO: 78916 - DNA, 15 bp, Homo sapiens
caggttttaaagata

SEQ ID NO: 78917 - DNA, 15 bp, Homo sapiens
aggttttaaagatag

SEQ ID NO: 78918 - DNA, 15 bp, Homo sapiens
ggttttaaagatagt

SEQ ID NO: 78919 - DNA, 15 bp, Homo sapiens
gttttaaagatagtt

SEQ ID NO: 78920 - DNA, 15 bp, Homo sapiens
ttttaaagatagttg

SEQ ID NO: 78921 - DNA, 15 bp, Homo sapiens
tttaaagatagttgc

SEQ ID NO: 78922 - DNA, 15 bp, Homo sapiens
ttaaagatagttgct

SEQ ID NO: 78923 - DNA, 15 bp, Homo sapiens
taaagatagttgcta

SEQ ID NO: 78924 - DNA, 15 bp, Homo sapiens
aaagatagttgctaa

SEQ ID NO: 78925 - DNA, 15 bp, Homo sapiens
aagatagttgctaat

SEQ ID NO: 78926 - DNA, 15 bp, Homo sapiens
agatagttgctaatc

SEQ ID NO: 78927 - DNA, 15 bp, Homo sapiens
gatagttgctaatcc

SEQ ID NO: 78928 - DNA, 15 bp, Homo sapiens
atagttgctaatcct

SEQ ID NO: 78929 - DNA, 15 bp, Homo sapiens
tagttgctaatcctt

SEQ ID NO: 78930 - DNA, 15 bp, Homo sapiens
agttgctaatcctta

SEQ ID NO: 78931 - DNA, 15 bp, Homo sapiens
gttgctaatccttat

SEQ ID NO: 78932 - DNA, 15 bp, Homo sapiens
ttgctaatccttatt

SEQ ID NO: 78933 - DNA, 15 bp, Homo sapiens
tgctaatccttattt

SEQ ID NO: 78934 - DNA, 15 bp, Homo sapiens
gctaatccttatttc

SEQ ID NO: 78935 - DNA, 15 bp, Homo sapiens
ctaatccttatttct

SEQ ID NO: 78936 - DNA, 15 bp, Homo sapiens
taatccttatttctt

SEQ ID NO: 78937 - DNA, 15 bp, Homo sapiens
aatccttatttcttc

SEQ ID NO: 78938 - DNA, 15 bp, Homo sapiens
atccttatttcttct

SEQ ID NO: 78939 - DNA, 15 bp, Homo sapiens
tccttatttcttcta

SEQ ID NO: 78940 - DNA, 15 bp, Homo sapiens
ccttatttcttctaa

SEQ ID NO: 78941 - DNA, 15 bp, Homo sapiens
cttatttcttctaaa

SEQ ID NO: 78942 - DNA, 15 bp, Homo sapiens
ttatttcttctaaat

SEQ ID NO: 78943 - DNA, 15 bp, Homo sapiens
tatttcttctaaatt

SEQ ID NO: 78944 - DNA, 15 bp, Homo sapiens
atttcttctaaattt

SEQ ID NO: 78945 - DNA, 15 bp, Homo sapiens
tttcttctaaatttt

SEQ ID NO: 78946 - DNA, 15 bp, Homo sapiens
ttcttctaaattttt

SEQ ID NO: 78947 - DNA, 15 bp, Homo sapiens
tcttctaaattttta

SEQ ID NO: 78948 - DNA, 15 bp, Homo sapiens
cttctaaatttttaa

SEQ ID NO: 78949 - DNA, 15 bp, Homo sapiens
ttctaaatttttaaa

SEQ ID NO: 78950 - DNA, 15 bp, Homo sapiens
tctaaatttttaaat

SEQ ID NO: 78951 - DNA, 15 bp, Homo sapiens
ctaaatttttaaatc

SEQ ID NO: 78952 - DNA, 15 bp, Homo sapiens
taaatttttaaatca

SEQ ID NO: 78953 - DNA, 15 bp, Homo sapiens
aaatttttaaatcag

SEQ ID NO: 78954 - DNA, 15 bp, Homo sapiens
aatttttaaatcagt

SEQ ID NO: 78955 - DNA, 15 bp, Homo sapiens
atttttaaatcagtt

SEQ ID NO: 78956 - DNA, 15 bp, Homo sapiens
tttttaaatcagttg

SEQ ID NO: 78957 - DNA, 15 bp, Homo sapiens
ttttaaatcagttgc

SEQ ID NO: 78958 - DNA, 15 bp, Homo sapiens
tttaaatcagttgct

SEQ ID NO: 78959 - DNA, 15 bp, Homo sapiens
ttaaatcagttgctg

SEQ ID NO: 78960 - DNA, 15 bp, Homo sapiens
taaatcagttgctgc

SEQ ID NO: 78961 - DNA, 15 bp, Homo sapiens
aaatcagttgctgcc

SEQ ID NO: 78962 - DNA, 15 bp, Homo sapiens
aatcagttgctgcct

SEQ ID NO: 78963 - DNA, 15 bp, Homo sapiens
atcagttgctgcctc

SEQ ID NO: 78964 - DNA, 15 bp, Homo sapiens
tcagttgctgcctca

SEQ ID NO: 78965 - DNA, 15 bp, Homo sapiens
cagttgctgcctcaa

SEQ ID NO: 78966 - DNA, 15 bp, Homo sapiens
agttgctgcctcaat

SEQ ID NO: 78967 - DNA, 15 bp, Homo sapiens
gttgctgcctcaatt

SEQ ID NO: 78968 - DNA, 15 bp, Homo sapiens
ttgctgcctcaattt

SEQ ID NO: 78969 - DNA, 15 bp, Homo sapiens
tgctgcctcaatttc

SEQ ID NO: 78970 - DNA, 15 bp, Homo sapiens
gctgcctcaatttct

SEQ ID NO: 78971 - DNA, 15 bp, Homo sapiens
ctgcctcaatttcta

SEQ ID NO: 78972 - DNA, 15 bp, Homo sapiens
tgcctcaatttctat

SEQ ID NO: 78973 - DNA, 15 bp, Homo sapiens
gcctcaatttctata

SEQ ID NO: 78974 - DNA, 15 bp, Homo sapiens
cctcaatttctatat

SEQ ID NO: 78975 - DNA, 15 bp, Homo sapiens
ctcaatttctatatg

SEQ ID NO: 78976 - DNA, 15 bp, Homo sapiens
tcaatttctatatga

SEQ ID NO: 78977 - DNA, 15 bp, Homo sapiens
caatttctatatgag

SEQ ID NO: 78978 - DNA, 15 bp, Homo sapiens
aatttctatatgaga

SEQ ID NO: 78979 - DNA, 15 bp, Homo sapiens
atttctatatgagaa

SEQ ID NO: 78980 - DNA, 15 bp, Homo sapiens
tttctatatgagaaa

SEQ ID NO: 78981 - DNA, 15 bp, Homo sapiens
ttctatatgagaaat

SEQ ID NO: 78982 - DNA, 15 bp, Homo sapiens
tctatatgagaaatg

SEQ ID NO: 78983 - DNA, 15 bp, Homo sapiens
ctatatgagaaatga

SEQ ID NO: 78984 - DNA, 15 bp, Homo sapiens
tatatgagaaatgac

SEQ ID NO: 78985 - DNA, 15 bp, Homo sapiens
atatgagaaatgact

SEQ ID NO: 78986 - DNA, 15 bp, Homo sapiens
tatgagaaatgactg

SEQ ID NO: 78987 - DNA, 15 bp, Homo sapiens
atgagaaatgactga

SEQ ID NO: 78988 - DNA, 15 bp, Homo sapiens
tgagaaatgactgat

SEQ ID NO: 78989 - DNA, 15 bp, Homo sapiens
gagaaatgactgatt

SEQ ID NO: 78990 - DNA, 15 bp, Homo sapiens
agaaatgactgattg

SEQ ID NO: 78991 - DNA, 15 bp, Homo sapiens
gaaatgactgattga

SEQ ID NO: 78992 - DNA, 15 bp, Homo sapiens
aaatgactgattgat

SEQ ID NO: 78993 - DNA, 15 bp, Homo sapiens
aatgactgattgatt

SEQ ID NO: 78994 - DNA, 15 bp, Homo sapiens
atgactgattgattt

SEQ ID NO: 78995 - DNA, 15 bp, Homo sapiens
tgactgattgatttc

SEQ ID NO: 78996 - DNA, 15 bp, Homo sapiens
gactgattgatttca

SEQ ID NO: 78997 - DNA, 15 bp, Homo sapiens
actgattgatttcat

SEQ ID NO: 78998 - DNA, 15 bp, Homo sapiens
ctgattgatttcatt

SEQ ID NO: 78999 - DNA, 15 bp, Homo sapiens
tgattgatttcattt

SEQ ID NO: 79000 - DNA, 15 bp, Homo sapiens
gattgatttcatttt

SEQ ID NO: 79001 - DNA, 15 bp, Homo sapiens
attgatttcattttt

SEQ ID NO: 79002 - DNA, 15 bp, Homo sapiens
ttgatttcatttttc

SEQ ID NO: 79003 - DNA, 15 bp, Homo sapiens
tgatttcatttttct

SEQ ID NO: 79004 - DNA, 15 bp, Homo sapiens
gatttcatttttctg

SEQ ID NO: 79005 - DNA, 15 bp, Homo sapiens
atttcatttttctgt

SEQ ID NO: 79006 - DNA, 15 bp, Homo sapiens
tttcatttttctgtt

SEQ ID NO: 79007 - DNA, 15 bp, Homo sapiens
ttcatttttctgttc

SEQ ID NO: 79008 - DNA, 15 bp, Homo sapiens
tcatttttctgttca

SEQ ID NO: 79009 - DNA, 15 bp, Homo sapiens
catttttctgttcac

SEQ ID NO: 79010 - DNA, 15 bp, Homo sapiens
atttttctgttcacg

SEQ ID NO: 79011 - DNA, 15 bp, Homo sapiens
tttttctgttcacgc

SEQ ID NO: 79012 - DNA, 15 bp, Homo sapiens
ttttctgttcacgct

SEQ ID NO: 79013 - DNA, 15 bp, Homo sapiens
tttctgttcacgcta

SEQ ID NO: 79014 - DNA, 15 bp, Homo sapiens
ttctgttcacgctac

SEQ ID NO: 79015 - DNA, 15 bp, Homo sapiens
tctgttcacgctacc

SEQ ID NO: 79016 - DNA, 15 bp, Homo sapiens
ctgttcacgctacca

SEQ ID NO: 79017 - DNA, 15 bp, Homo sapiens
tgttcacgctaccat

SEQ ID NO: 79018 - DNA, 15 bp, Homo sapiens
gttcacgctaccatt

SEQ ID NO: 79019 - DNA, 15 bp, Homo sapiens
ttcacgctaccattt

SEQ ID NO: 79020 - DNA, 15 bp, Homo sapiens
tcacgctaccatttt

SEQ ID NO: 79021 - DNA, 15 bp, Homo sapiens
cacgctaccattttc

SEQ ID NO: 79022 - DNA, 15 bp, Homo sapiens
acgctaccattttca

SEQ ID NO: 79023 - DNA, 15 bp, Homo sapiens
cgctaccattttcat

SEQ ID NO: 79024 - DNA, 15 bp, Homo sapiens
gctaccattttcata

SEQ ID NO: 79025 - DNA, 15 bp, Homo sapiens
ctaccattttcatat

SEQ ID NO: 79026 - DNA, 15 bp, Homo sapiens
taccattttcatatc

SEQ ID NO: 79027 - DNA, 15 bp, Homo sapiens
accattttcatatca

SEQ ID NO: 79028 - DNA, 15 bp, Homo sapiens
ccattttcatatcat

SEQ ID NO: 79029 - DNA, 15 bp, Homo sapiens
cattttcatatcata

SEQ ID NO: 79030 - DNA, 15 bp, Homo sapiens
attttcatatcatac

SEQ ID NO: 79031 - DNA, 15 bp, Homo sapiens
ttttcatatcatact

SEQ ID NO: 79032 - DNA, 15 bp, Homo sapiens
tttcatatcatacta

SEQ ID NO: 79033 - DNA, 15 bp, Homo sapiens
ttcatatcatactag

SEQ ID NO: 79034 - DNA, 15 bp, Homo sapiens
tcatatcatactagc

SEQ ID NO: 79035 - DNA, 15 bp, Homo sapiens
catatcatactagca

SEQ ID NO: 79036 - DNA, 15 bp, Homo sapiens
atatcatactagcac

SEQ ID NO: 79037 - DNA, 15 bp, Homo sapiens
tatcatactagcaca

SEQ ID NO: 79038 - DNA, 15 bp, Homo sapiens
atcatactagcacat

SEQ ID NO: 79039 - DNA, 15 bp, Homo sapiens
tcatactagcacatg

SEQ ID NO: 79040 - DNA, 15 bp, Homo sapiens
catactagcacatgt

SEQ ID NO: 79041 - DNA, 15 bp, Homo sapiens
atactagcacatgtt

SEQ ID NO: 79042 - DNA, 15 bp, Homo sapiens
tactagcacatgtta

SEQ ID NO: 79043 - DNA, 15 bp, Homo sapiens
actagcacatgttac

SEQ ID NO: 79044 - DNA, 15 bp, Homo sapiens
ctagcacatgttacc

SEQ ID NO: 79045 - DNA, 15 bp, Homo sapiens
tagcacatgttaccc

SEQ ID NO: 79046 - DNA, 15 bp, Homo sapiens
agcacatgttaccca

SEQ ID NO: 79047 - DNA, 15 bp, Homo sapiens
gcacatgttacccat

SEQ ID NO: 79048 - DNA, 15 bp, Homo sapiens
cacatgttacccatt

SEQ ID NO: 79049 - DNA, 15 bp, Homo sapiens
acatgttacccatta

SEQ ID NO: 79050 - DNA, 15 bp, Homo sapiens
catgttacccattaa

SEQ ID NO: 79051 - DNA, 15 bp, Homo sapiens
atgttacccattaac

SEQ ID NO: 79052 - DNA, 15 bp, Homo sapiens
tgttacccattaact

SEQ ID NO: 79053 - DNA, 15 bp, Homo sapiens
gttacccattaactg

SEQ ID NO: 79054 - DNA, 15 bp, Homo sapiens
ttacccattaactgt

SEQ ID NO: 79055 - DNA, 15 bp, Homo sapiens
tacccattaactgta

SEQ ID NO: 79056 - DNA, 15 bp, Homo sapiens
acccattaactgtat

SEQ ID NO: 79057 - DNA, 15 bp, Homo sapiens
cccattaactgtatt

SEQ ID NO: 79058 - DNA, 15 bp, Homo sapiens
ccattaactgtattg

SEQ ID NO: 79059 - DNA, 15 bp, Homo sapiens
cattaactgtattgc

SEQ ID NO: 79060 - DNA, 15 bp, Homo sapiens
attaactgtattgca

SEQ ID NO: 79061 - DNA, 15 bp, Homo sapiens
ttaactgtattgcag

SEQ ID NO: 79062 - DNA, 15 bp, Homo sapiens
taactgtattgcaga

SEQ ID NO: 79063 - DNA, 15 bp, Homo sapiens
aactgtattgcagat

SEQ ID NO: 79064 - DNA, 15 bp, Homo sapiens
actgtattgcagatt

SEQ ID NO: 79065 - DNA, 15 bp, Homo sapiens
ctgtattgcagattt

SEQ ID NO: 79066 - DNA, 15 bp, Homo sapiens
tgtattgcagatttg

SEQ ID NO: 79067 - DNA, 15 bp, Homo sapiens
gtattgcagatttgg

SEQ ID NO: 79068 - DNA, 15 bp, Homo sapiens
tattgcagatttggt

SEQ ID NO: 79069 - DNA, 15 bp, Homo sapiens
attgcagatttggtc

SEQ ID NO: 79070 - DNA, 15 bp, Homo sapiens
ttgcagatttggtct

SEQ ID NO: 79071 - DNA, 15 bp, Homo sapiens
tgcagatttggtctc

SEQ ID NO: 79072 - DNA, 15 bp, Homo sapiens
gcagatttggtctca

SEQ ID NO: 79073 - DNA, 15 bp, Homo sapiens
cagatttggtctcac

SEQ ID NO: 79074 - DNA, 15 bp, Homo sapiens
agatttggtctcaca

SEQ ID NO: 79075 - DNA, 15 bp, Homo sapiens
gatttggtctcacaa

SEQ ID NO: 79076 - DNA, 15 bp, Homo sapiens
atttggtctcacaaa

SEQ ID NO: 79077 - DNA, 15 bp, Homo sapiens
tttggtctcacaaaa

SEQ ID NO: 79078 - DNA, 15 bp, Homo sapiens
ttggtctcacaaaat

SEQ ID NO: 79079 - DNA, 15 bp, Homo sapiens
tggtctcacaaaatt

SEQ ID NO: 79080 - DNA, 15 bp, Homo sapiens
ggtctcacaaaattc

SEQ ID NO: 79081 - DNA, 15 bp, Homo sapiens
gtctcacaaaattct

SEQ ID NO: 79082 - DNA, 15 bp, Homo sapiens
tctcacaaaattctt

SEQ ID NO: 79083 - DNA, 15 bp, Homo sapiens
ctcacaaaattcttc

SEQ ID NO: 79084 - DNA, 15 bp, Homo sapiens
tcacaaaattcttct

SEQ ID NO: 79085 - DNA, 15 bp, Homo sapiens
cacaaaattcttcta

SEQ ID NO: 79086 - DNA, 15 bp, Homo sapiens
acaaaattcttctaa

SEQ ID NO: 79087 - DNA, 15 bp, Homo sapiens
caaaattcttctaaa

SEQ ID NO: 79088 - DNA, 15 bp, Homo sapiens
aaaattcttctaaaa

SEQ ID NO: 79089 - DNA, 15 bp, Homo sapiens
aaattcttctaaaat

SEQ ID NO: 79090 - DNA, 15 bp, Homo sapiens
aattcttctaaaata

SEQ ID NO: 79091 - DNA, 15 bp, Homo sapiens
attcttctaaaataa

SEQ ID NO: 79092 - DNA, 15 bp, Homo sapiens
ttcttctaaaataac

SEQ ID NO: 79093 - DNA, 15 bp, Homo sapiens
tcttctaaaataaca

SEQ ID NO: 79094 - DNA, 15 bp, Homo sapiens
cttctaaaataacat

SEQ ID NO: 79095 - DNA, 15 bp, Homo sapiens
ttctaaaataacatt

SEQ ID NO: 79096 - DNA, 15 bp, Homo sapiens
tctaaaataacattt

SEQ ID NO: 79097 - DNA, 15 bp, Homo sapiens
ctaaaataacatttt

SEQ ID NO: 79098 - DNA, 15 bp, Homo sapiens
taaaataacattttt

SEQ ID NO: 79099 - DNA, 15 bp, Homo sapiens
aaaataacattttta

SEQ ID NO: 79100 - DNA, 15 bp, Homo sapiens
aaataacatttttaa

SEQ ID NO: 79101 - DNA, 15 bp, Homo sapiens
aataacatttttaaa

SEQ ID NO: 79102 - DNA, 15 bp, Homo sapiens
ataacatttttaaaa

SEQ ID NO: 79103 - DNA, 15 bp, Homo sapiens
taacatttttaaaaa

SEQ ID NO: 79104 - DNA, 15 bp, Homo sapiens
aacatttttaaaaag

SEQ ID NO: 79105 - DNA, 15 bp, Homo sapiens
acatttttaaaaagc

SEQ ID NO: 79106 - DNA, 15 bp, Homo sapiens
catttttaaaaagca

SEQ ID NO: 79107 - DNA, 15 bp, Homo sapiens
atttttaaaaagcat

SEQ ID NO: 79108 - DNA, 15 bp, Homo sapiens
tttttaaaaagcata

SEQ ID NO: 79109 - DNA, 15 bp, Homo sapiens
ttttaaaaagcatat

SEQ ID NO: 79110 - DNA, 15 bp, Homo sapiens
tttaaaaagcatatt

SEQ ID NO: 79111 - DNA, 15 bp, Homo sapiens
ttaaaaagcatatta

SEQ ID NO: 79112 - DNA, 15 bp, Homo sapiens
taaaaagcatattaa

SEQ ID NO: 79113 - DNA, 15 bp, Homo sapiens
aaaaagcatattaat

SEQ ID NO: 79114 - DNA, 15 bp, Homo sapiens
aaaagcatattaatc

SEQ ID NO: 79115 - DNA, 15 bp, Homo sapiens
aaagcatattaatca

SEQ ID NO: 79116 - DNA, 15 bp, Homo sapiens
aagcatattaatcaa

SEQ ID NO: 79117 - DNA, 15 bp, Homo sapiens
agcatattaatcaaa

SEQ ID NO: 79118 - DNA, 15 bp, Homo sapiens
gcatattaatcaaaa

SEQ ID NO: 79119 - DNA, 15 bp, Homo sapiens
catattaatcaaaaa

SEQ ID NO: 79120 - DNA, 15 bp, Homo sapiens
atattaatcaaaaat

SEQ ID NO: 79121 - DNA, 15 bp, Homo sapiens
tattaatcaaaaata

SEQ ID NO: 79122 - DNA, 15 bp, Homo sapiens
attaatcaaaaataa

SEQ ID NO: 79123 - DNA, 15 bp, Homo sapiens
ttaatcaaaaataag

SEQ ID NO: 79124 - DNA, 15 bp, Homo sapiens
taatcaaaaataagc

SEQ ID NO: 79125 - DNA, 15 bp, Homo sapiens
aatcaaaaataagct

SEQ ID NO: 79126 - DNA, 15 bp, Homo sapiens
atcaaaaataagctt

SEQ ID NO: 79127 - DNA, 15 bp, Homo sapiens
tcaaaaataagcttt

SEQ ID NO: 79128 - DNA, 15 bp, Homo sapiens
caaaaataagcttta

SEQ ID NO: 79129 - DNA, 15 bp, Homo sapiens
aaaaataagctttat

SEQ ID NO: 79130 - DNA, 15 bp, Homo sapiens
aaaataagctttata

SEQ ID NO: 79131 - DNA, 15 bp, Homo sapiens
aaataagctttatat

SEQ ID NO: 79132 - DNA, 15 bp, Homo sapiens
aataagctttatatt

SEQ ID NO: 79133 - DNA, 15 bp, Homo sapiens
ataagctttatattt

SEQ ID NO: 79134 - DNA, 15 bp, Homo sapiens
taagctttatatttc

SEQ ID NO: 79135 - DNA, 15 bp, Homo sapiens
aagctttatatttct

SEQ ID NO: 79136 - DNA, 15 bp, Homo sapiens
agctttatatttctg

SEQ ID NO: 79137 - DNA, 15 bp, Homo sapiens
gctttatatttctga

SEQ ID NO: 79138 - DNA, 15 bp, Homo sapiens
ctttatatttctgaa

SEQ ID NO: 79139 - DNA, 15 bp, Homo sapiens
tttatatttctgaag

SEQ ID NO: 79140 - DNA, 15 bp, Homo sapiens
ttatatttctgaagc

SEQ ID NO: 79141 - DNA, 15 bp, Homo sapiens
tatatttctgaagct

SEQ ID NO: 79142 - DNA, 15 bp, Homo sapiens
atatttctgaagctt

SEQ ID NO: 79143 - DNA, 15 bp, Homo sapiens
tatttctgaagcttg

SEQ ID NO: 79144 - DNA, 15 bp, Homo sapiens
atttctgaagcttgt

SEQ ID NO: 79145 - DNA, 15 bp, Homo sapiens
tttctgaagcttgtt

SEQ ID NO: 79146 - DNA, 15 bp, Homo sapiens
ttctgaagcttgttt

SEQ ID NO: 79147 - DNA, 15 bp, Homo sapiens
tctgaagcttgtttg

SEQ ID NO: 79148 - DNA, 15 bp, Homo sapiens
ctgaagcttgtttga

SEQ ID NO: 79149 - DNA, 15 bp, Homo sapiens
tgaagcttgtttgag

SEQ ID NO: 79150 - DNA, 15 bp, Homo sapiens
gaagcttgtttgagc

SEQ ID NO: 79151 - DNA, 15 bp, Homo sapiens
aagcttgtttgagca

SEQ ID NO: 79152 - DNA, 15 bp, Homo sapiens
agcttgtttgagcat

SEQ ID NO: 79153 - DNA, 15 bp, Homo sapiens
gcttgtttgagcata

SEQ ID NO: 79154 - DNA, 15 bp, Homo sapiens
cttgtttgagcatag

SEQ ID NO: 79155 - DNA, 15 bp, Homo sapiens
ttgtttgagcataga

SEQ ID NO: 79156 - DNA, 15 bp, Homo sapiens
tgtttgagcatagaa

SEQ ID NO: 79157 - DNA, 15 bp, Homo sapiens
gtttgagcatagaat

SEQ ID NO: 79158 - DNA, 15 bp, Homo sapiens
tttgagcatagaatg

SEQ ID NO: 79159 - DNA, 15 bp, Homo sapiens
ttgagcatagaatgc

SEQ ID NO: 79160 - DNA, 15 bp, Homo sapiens
tgagcatagaatgcc

SEQ ID NO: 79161 - DNA, 15 bp, Homo sapiens
gagcatagaatgcct

SEQ ID NO: 79162 - DNA, 15 bp, Homo sapiens
agcatagaatgcctt

SEQ ID NO: 79163 - DNA, 15 bp, Homo sapiens
gcatagaatgccttt

SEQ ID NO: 79164 - DNA, 15 bp, Homo sapiens
catagaatgcctttg

SEQ ID NO: 79165 - DNA, 15 bp, Homo sapiens
atagaatgcctttgg

SEQ ID NO: 79166 - DNA, 15 bp, Homo sapiens
tagaatgcctttgga

SEQ ID NO: 79167 - DNA, 15 bp, Homo sapiens
agaatgcctttggat

SEQ ID NO: 79168 - DNA, 15 bp, Homo sapiens
gaatgcctttggata

SEQ ID NO: 79169 - DNA, 15 bp, Homo sapiens
aatgcctttggataa

SEQ ID NO: 79170 - DNA, 15 bp, Homo sapiens
atgcctttggataaa

SEQ ID NO: 79171 - DNA, 15 bp, Homo sapiens
tgcctttggataaaa

SEQ ID NO: 79172 - DNA, 15 bp, Homo sapiens
gcctttggataaaat

SEQ ID NO: 79173 - DNA, 15 bp, Homo sapiens
cctttggataaaata

SEQ ID NO: 79174 - DNA, 15 bp, Homo sapiens
ctttggataaaatac

SEQ ID NO: 79175 - DNA, 15 bp, Homo sapiens
tttggataaaatacc

SEQ ID NO: 79176 - DNA, 15 bp, Homo sapiens
ttggataaaatacca

SEQ ID NO: 79177 - DNA, 15 bp, Homo sapiens
tggataaaataccat

SEQ ID NO: 79178 - DNA, 15 bp, Homo sapiens
ggataaaataccatt

SEQ ID NO: 79179 - DNA, 15 bp, Homo sapiens
gataaaataccatta

SEQ ID NO: 79180 - DNA, 15 bp, Homo sapiens
ataaaataccattac

SEQ ID NO: 79181 - DNA, 15 bp, Homo sapiens
taaaataccattacc

SEQ ID NO: 79182 - DNA, 15 bp, Homo sapiens
aaaataccattacct

SEQ ID NO: 79183 - DNA, 15 bp, Homo sapiens
aaataccattaccta

SEQ ID NO: 79184 - DNA, 15 bp, Homo sapiens
aataccattacctag

SEQ ID NO: 79185 - DNA, 15 bp, Homo sapiens
ataccattacctagt

SEQ ID NO: 79186 - DNA, 15 bp, Homo sapiens
taccattacctagta

SEQ ID NO: 79187 - DNA, 15 bp, Homo sapiens
accattacctagtaa

SEQ ID NO: 79188 - DNA, 15 bp, Homo sapiens
ccattacctagtaaa

SEQ ID NO: 79189 - DNA, 15 bp, Homo sapiens
cattacctagtaaag

SEQ ID NO: 79190 - DNA, 15 bp, Homo sapiens
attacctagtaaagt

SEQ ID NO: 79191 - DNA, 15 bp, Homo sapiens
ttacctagtaaagtg

SEQ ID NO: 79192 - DNA, 15 bp, Homo sapiens
tacctagtaaagtgt

SEQ ID NO: 79193 - DNA, 15 bp, Homo sapiens
acctagtaaagtgtg

SEQ ID NO: 79194 - DNA, 15 bp, Homo sapiens
cctagtaaagtgtga

SEQ ID NO: 79195 - DNA, 15 bp, Homo sapiens
ctagtaaagtgtgaa

SEQ ID NO: 79196 - DNA, 15 bp, Homo sapiens
tagtaaagtgtgaac

SEQ ID NO: 79197 - DNA, 15 bp, Homo sapiens
agtaaagtgtgaact

SEQ ID NO: 79198 - DNA, 15 bp, Homo sapiens
gtaaagtgtgaactt

SEQ ID NO: 79199 - DNA, 15 bp, Homo sapiens
taaagtgtgaacttt

SEQ ID NO: 79200 - DNA, 15 bp, Homo sapiens
aaagtgtgaactttt

SEQ ID NO: 79201 - DNA, 15 bp, Homo sapiens
aagtgtgaactttta

SEQ ID NO: 79202 - DNA, 15 bp, Homo sapiens
agtgtgaacttttat

SEQ ID NO: 79203 - DNA, 15 bp, Homo sapiens
gtgtgaacttttata

SEQ ID NO: 79204 - DNA, 15 bp, Homo sapiens
tgtgaacttttataa

SEQ ID NO: 79205 - DNA, 15 bp, Homo sapiens
gtgaacttttataat

SEQ ID NO: 79206 - DNA, 15 bp, Homo sapiens
tgaacttttataatc

SEQ ID NO: 79207 - DNA, 15 bp, Homo sapiens
gaacttttataatcc

SEQ ID NO: 79208 - DNA, 15 bp, Homo sapiens
aacttttataatcca

SEQ ID NO: 79209 - DNA, 15 bp, Homo sapiens
acttttataatccat

SEQ ID NO: 79210 - DNA, 15 bp, Homo sapiens
cttttataatccata

SEQ ID NO: 79211 - DNA, 15 bp, Homo sapiens
ttttataatccataa

SEQ ID NO: 79212 - DNA, 15 bp, Homo sapiens
tttataatccataaa

SEQ ID NO: 79213 - DNA, 15 bp, Homo sapiens
ttataatccataaaa

SEQ ID NO: 79214 - DNA, 15 bp, Homo sapiens
tataatccataaaaa

SEQ ID NO: 79215 - DNA, 15 bp, Homo sapiens
ataatccataaaaat

SEQ ID NO: 79216 - DNA, 15 bp, Homo sapiens
taatccataaaaatt

SEQ ID NO: 79217 - DNA, 15 bp, Homo sapiens
aatccataaaaatta

SEQ ID NO: 79218 - DNA, 15 bp, Homo sapiens
atccataaaaattat

SEQ ID NO: 79219 - DNA, 15 bp, Homo sapiens
tccataaaaattatt

SEQ ID NO: 79220 - DNA, 15 bp, Homo sapiens
ccataaaaattattc

SEQ ID NO: 79221 - DNA, 15 bp, Homo sapiens
cataaaaattattct

SEQ ID NO: 79222 - DNA, 15 bp, Homo sapiens
ataaaaattattctt

SEQ ID NO: 79223 - DNA, 15 bp, Homo sapiens
taaaaattattcttt

SEQ ID NO: 79224 - DNA, 15 bp, Homo sapiens
aaaaattattctttt

SEQ ID NO: 79225 - DNA, 15 bp, Homo sapiens
aaaattattctttta

SEQ ID NO: 79226 - DNA, 15 bp, Homo sapiens
aaattattcttttat

SEQ ID NO: 79227 - DNA, 15 bp, Homo sapiens
aattattcttttata

SEQ ID NO: 79228 - DNA, 15 bp, Homo sapiens
attattcttttataa

SEQ ID NO: 79229 - DNA, 15 bp, Homo sapiens
ttattcttttataag

SEQ ID NO: 79230 - DNA, 15 bp, Homo sapiens
tattcttttataaga

SEQ ID NO: 79231 - DNA, 15 bp, Homo sapiens
attcttttataagaa

SEQ ID NO: 79232 - DNA, 15 bp, Homo sapiens
ttcttttataagaat

SEQ ID NO: 79233 - DNA, 15 bp, Homo sapiens
tcttttataagaata

SEQ ID NO: 79234 - DNA, 15 bp, Homo sapiens
cttttataagaatat

SEQ ID NO: 79235 - DNA, 15 bp, Homo sapiens
ttttataagaatatt

SEQ ID NO: 79236 - DNA, 15 bp, Homo sapiens
tttataagaatattc

SEQ ID NO: 79237 - DNA, 15 bp, Homo sapiens
ttataagaatattca

SEQ ID NO: 79238 - DNA, 15 bp, Homo sapiens
tataagaatattcat

SEQ ID NO: 79239 - DNA, 15 bp, Homo sapiens
ataagaatattcata

SEQ ID NO: 79240 - DNA, 15 bp, Homo sapiens
taagaatattcataa

SEQ ID NO: 79241 - DNA, 15 bp, Homo sapiens
aagaatattcataaa

SEQ ID NO: 79242 - DNA, 15 bp, Homo sapiens
agaatattcataaat

SEQ ID NO: 79243 - DNA, 15 bp, Homo sapiens
gaatattcataaatg

SEQ ID NO: 79244 - DNA, 15 bp, Homo sapiens
aatattcataaatgt

SEQ ID NO: 79245 - DNA, 15 bp, Homo sapiens
atattcataaatgta

SEQ ID NO: 79246 - DNA, 15 bp, Homo sapiens
tattcataaatgtag

SEQ ID NO: 79247 - DNA, 15 bp, Homo sapiens
attcataaatgtagt

SEQ ID NO: 79248 - DNA, 15 bp, Homo sapiens
ttcataaatgtagtt

SEQ ID NO: 79249 - DNA, 15 bp, Homo sapiens
tcataaatgtagtta

SEQ ID NO: 79250 - DNA, 15 bp, Homo sapiens
cataaatgtagttag

SEQ ID NO: 79251 - DNA, 15 bp, Homo sapiens
ataaatgtagttaga

SEQ ID NO: 79252 - DNA, 15 bp, Homo sapiens
taaatgtagttagat

SEQ ID NO: 79253 - DNA, 15 bp, Homo sapiens
aaatgtagttagatt

SEQ ID NO: 79254 - DNA, 15 bp, Homo sapiens
aatgtagttagatta

SEQ ID NO: 79255 - DNA, 15 bp, Homo sapiens
atgtagttagattaa

SEQ ID NO: 79256 - DNA, 15 bp, Homo sapiens
tgtagttagattaat

SEQ ID NO: 79257 - DNA, 15 bp, Homo sapiens
gtagttagattaata

SEQ ID NO: 79258 - DNA, 15 bp, Homo sapiens
tagttagattaatag

SEQ ID NO: 79259 - DNA, 15 bp, Homo sapiens
agttagattaataga

SEQ ID NO: 79260 - DNA, 15 bp, Homo sapiens
gttagattaatagaa

SEQ ID NO: 79261 - DNA, 15 bp, Homo sapiens
ttagattaatagaag

SEQ ID NO: 79262 - DNA, 15 bp, Homo sapiens
tagattaatagaaga

SEQ ID NO: 79263 - DNA, 15 bp, Homo sapiens
agattaatagaagat

SEQ ID NO: 79264 - DNA, 15 bp, Homo sapiens
gattaatagaagatt

SEQ ID NO: 79265 - DNA, 15 bp, Homo sapiens
attaatagaagattc

SEQ ID NO: 79266 - DNA, 15 bp, Homo sapiens
ttaatagaagattct

SEQ ID NO: 79267 - DNA, 15 bp, Homo sapiens
taatagaagattctc

SEQ ID NO: 79268 - DNA, 15 bp, Homo sapiens
aatagaagattctcg

SEQ ID NO: 79269 - DNA, 15 bp, Homo sapiens
atagaagattctcga

SEQ ID NO: 79270 - DNA, 15 bp, Homo sapiens
tagaagattctcgat

SEQ ID NO: 79271 - DNA, 15 bp, Homo sapiens
agaagattctcgatt

SEQ ID NO: 79272 - DNA, 15 bp, Homo sapiens
gaagattctcgattc

SEQ ID NO: 79273 - DNA, 15 bp, Homo sapiens
aagattctcgattct

SEQ ID NO: 79274 - DNA, 15 bp, Homo sapiens
agattctcgattctt

SEQ ID NO: 79275 - DNA, 15 bp, Homo sapiens
gattctcgattcttt

SEQ ID NO: 79276 - DNA, 15 bp, Homo sapiens
attctcgattctttg

SEQ ID NO: 79277 - DNA, 15 bp, Homo sapiens
ttctcgattctttga

SEQ ID NO: 79278 - DNA, 15 bp, Homo sapiens
tctcgattctttgat

SEQ ID NO: 79279 - DNA, 15 bp, Homo sapiens
ctcgattctttgatc

SEQ ID NO: 79280 - DNA, 15 bp, Homo sapiens
tcgattctttgatca

SEQ ID NO: 79281 - DNA, 15 bp, Homo sapiens
cgattctttgatcag

SEQ ID NO: 79282 - DNA, 15 bp, Homo sapiens
gattctttgatcaga

SEQ ID NO: 79283 - DNA, 15 bp, Homo sapiens
attctttgatcagaa

SEQ ID NO: 79284 - DNA, 15 bp, Homo sapiens
ttctttgatcagaaa

SEQ ID NO: 79285 - DNA, 15 bp, Homo sapiens
tctttgatcagaaaa

SEQ ID NO: 79286 - DNA, 15 bp, Homo sapiens
ctttgatcagaaaac

SEQ ID NO: 79287 - DNA, 15 bp, Homo sapiens
tttgatcagaaaact

SEQ ID NO: 79288 - DNA, 15 bp, Homo sapiens
ttgatcagaaaacta

SEQ ID NO: 79289 - DNA, 15 bp, Homo sapiens
tgatcagaaaactaa

SEQ ID NO: 79290 - DNA, 15 bp, Homo sapiens
gatcagaaaactaag

SEQ ID NO: 79291 - DNA, 15 bp, Homo sapiens
atcagaaaactaagg

SEQ ID NO: 79292 - DNA, 15 bp, Homo sapiens
tcagaaaactaagga

SEQ ID NO: 79293 - DNA, 15 bp, Homo sapiens
cagaaaactaaggac

SEQ ID NO: 79294 - DNA, 15 bp, Homo sapiens
agaaaactaaggact

SEQ ID NO: 79295 - DNA, 15 bp, Homo sapiens
gaaaactaaggacta

SEQ ID NO: 79296 - DNA, 15 bp, Homo sapiens
aaaactaaggactat

SEQ ID NO: 79297 - DNA, 15 bp, Homo sapiens
aaactaaggactata

SEQ ID NO: 79298 - DNA, 15 bp, Homo sapiens
aactaaggactatat

SEQ ID NO: 79299 - DNA, 15 bp, Homo sapiens
actaaggactatatt

SEQ ID NO: 79300 - DNA, 15 bp, Homo sapiens
ctaaggactatattg

SEQ ID NO: 79301 - DNA, 15 bp, Homo sapiens
taaggactatattga

SEQ ID NO: 79302 - DNA, 15 bp, Homo sapiens
aaggactatattgaa

SEQ ID NO: 79303 - DNA, 15 bp, Homo sapiens
aggactatattgaaa

SEQ ID NO: 79304 - DNA, 15 bp, Homo sapiens
ggactatattgaaaa

SEQ ID NO: 79305 - DNA, 15 bp, Homo sapiens
gactatattgaaaaa

SEQ ID NO: 79306 - DNA, 15 bp, Homo sapiens
actatattgaaaaat

SEQ ID NO: 79307 - DNA, 15 bp, Homo sapiens
ctatattgaaaaatc

SEQ ID NO: 79308 - DNA, 15 bp, Homo sapiens
tatattgaaaaatca

SEQ ID NO: 79309 - DNA, 15 bp, Homo sapiens
atattgaaaaatcag

SEQ ID NO: 79310 - DNA, 15 bp, Homo sapiens
tattgaaaaatcagt

SEQ ID NO: 79311 - DNA, 15 bp, Homo sapiens
attgaaaaatcagtg

SEQ ID NO: 79312 - DNA, 15 bp, Homo sapiens
ttgaaaaatcagtga

SEQ ID NO: 79313 - DNA, 15 bp, Homo sapiens
tgaaaaatcagtgac

SEQ ID NO: 79314 - DNA, 15 bp, Homo sapiens
gaaaaatcagtgaca

SEQ ID NO: 79315 - DNA, 15 bp, Homo sapiens
aaaaatcagtgacaa

SEQ ID NO: 79316 - DNA, 15 bp, Homo sapiens
aaaatcagtgacaaa

SEQ ID NO: 79317 - DNA, 15 bp, Homo sapiens
aaatcagtgacaaat

SEQ ID NO: 79318 - DNA, 15 bp, Homo sapiens
aatcagtgacaaatt

SEQ ID NO: 79319 - DNA, 15 bp, Homo sapiens
atcagtgacaaattt

SEQ ID NO: 79320 - DNA, 15 bp, Homo sapiens
tcagtgacaaattta

SEQ ID NO: 79321 - DNA, 15 bp, Homo sapiens
cagtgacaaatttaa

SEQ ID NO: 79322 - DNA, 15 bp, Homo sapiens
agtgacaaatttaat

SEQ ID NO: 79323 - DNA, 15 bp, Homo sapiens
gtgacaaatttaatt

SEQ ID NO: 79324 - DNA, 15 bp, Homo sapiens
tgacaaatttaattc

SEQ ID NO: 79325 - DNA, 15 bp, Homo sapiens
gacaaatttaattct

SEQ ID NO: 79326 - DNA, 15 bp, Homo sapiens
acaaatttaattctt

SEQ ID NO: 79327 - DNA, 15 bp, Homo sapiens
caaatttaattctta

SEQ ID NO: 79328 - DNA, 15 bp, Homo sapiens
aaatttaattcttat

SEQ ID NO: 79329 - DNA, 15 bp, Homo sapiens
aatttaattcttata

SEQ ID NO: 79330 - DNA, 15 bp, Homo sapiens
atttaattcttatag

SEQ ID NO: 79331 - DNA, 15 bp, Homo sapiens
tttaattcttatagt

SEQ ID NO: 79332 - DNA, 15 bp, Homo sapiens
ttaattcttatagta

SEQ ID NO: 79333 - DNA, 15 bp, Homo sapiens
taattcttatagtac

SEQ ID NO: 79334 - DNA, 15 bp, Homo sapiens
aattcttatagtaca

SEQ ID NO: 79335 - DNA, 15 bp, Homo sapiens
attcttatagtacat

SEQ ID NO: 79336 - DNA, 15 bp, Homo sapiens
ttcttatagtacatc

SEQ ID NO: 79337 - DNA, 15 bp, Homo sapiens
tcttatagtacatct

SEQ ID NO: 79338 - DNA, 15 bp, Homo sapiens
cttatagtacatctg

SEQ ID NO: 79339 - DNA, 15 bp, Homo sapiens
ttatagtacatctga

SEQ ID NO: 79340 - DNA, 15 bp, Homo sapiens
tatagtacatctgaa

SEQ ID NO: 79341 - DNA, 15 bp, Homo sapiens
atagtacatctgaaa

SEQ ID NO: 79342 - DNA, 15 bp, Homo sapiens
tagtacatctgaaag

SEQ ID NO: 79343 - DNA, 15 bp, Homo sapiens
agtacatctgaaaga

SEQ ID NO: 79344 - DNA, 15 bp, Homo sapiens
gtacatctgaaagaa

SEQ ID NO: 79345 - DNA, 15 bp, Homo sapiens
tacatctgaaagaaa

SEQ ID NO: 79346 - DNA, 15 bp, Homo sapiens
acatctgaaagaaaa

SEQ ID NO: 79347 - DNA, 15 bp, Homo sapiens
catctgaaagaaaaa

SEQ ID NO: 79348 - DNA, 15 bp, Homo sapiens
atctgaaagaaaaaa

SEQ ID NO: 79349 - DNA, 15 bp, Homo sapiens
tctgaaagaaaaaag

SEQ ID NO: 79350 - DNA, 15 bp, Homo sapiens
ctgaaagaaaaaaga

SEQ ID NO: 79351 - DNA, 15 bp, Homo sapiens
tgaaagaaaaaagaa

SEQ ID NO: 79352 - DNA, 15 bp, Homo sapiens
gaaagaaaaaagaaa

SEQ ID NO: 79353 - DNA, 15 bp, Homo sapiens
aaagaaaaaagaaaa

SEQ ID NO: 79354 - DNA, 15 bp, Homo sapiens
aagaaaaaagaaaac

SEQ ID NO: 79355 - DNA, 15 bp, Homo sapiens
agaaaaaagaaaact

SEQ ID NO: 79356 - DNA, 15 bp, Homo sapiens
gaaaaaagaaaactc

SEQ ID NO: 79357 - DNA, 15 bp, Homo sapiens
aaaaaagaaaactct

SEQ ID NO: 79358 - DNA, 15 bp, Homo sapiens
aaaaagaaaactctt

SEQ ID NO: 79359 - DNA, 15 bp, Homo sapiens
aaaagaaaactcttg

SEQ ID NO: 79360 - DNA, 15 bp, Homo sapiens
aaagaaaactcttgg

SEQ ID NO: 79361 - DNA, 15 bp, Homo sapiens
aagaaaactcttggg

SEQ ID NO: 79362 - DNA, 15 bp, Homo sapiens
agaaaactcttggga

SEQ ID NO: 79363 - DNA, 15 bp, Homo sapiens
gaaaactcttgggag

SEQ ID NO: 79364 - DNA, 15 bp, Homo sapiens
aaaactcttgggaga

SEQ ID NO: 79365 - DNA, 15 bp, Homo sapiens
aaactcttgggagaa

SEQ ID NO: 79366 - DNA, 15 bp, Homo sapiens
aactcttgggagaac

SEQ ID NO: 79367 - DNA, 15 bp, Homo sapiens
actcttgggagaact

SEQ ID NO: 79368 - DNA, 15 bp, Homo sapiens
ctcttgggagaactt

SEQ ID NO: 79369 - DNA, 15 bp, Homo sapiens
tcttgggagaacttt

SEQ ID NO: 79370 - DNA, 15 bp, Homo sapiens
cttgggagaactttt

SEQ ID NO: 79371 - DNA, 15 bp, Homo sapiens
ttgggagaactttta

SEQ ID NO: 79372 - DNA, 15 bp, Homo sapiens
tgggagaacttttac

SEQ ID NO: 79373 - DNA, 15 bp, Homo sapiens
gggagaacttttaca

SEQ ID NO: 79374 - DNA, 15 bp, Homo sapiens
ggagaacttttacag

SEQ ID NO: 79375 - DNA, 15 bp, Homo sapiens
gagaacttttacagt

SEQ ID NO: 79376 - DNA, 15 bp, Homo sapiens
agaacttttacagtg

SEQ ID NO: 79377 - DNA, 15 bp, Homo sapiens
gaacttttacagtga

SEQ ID NO: 79378 - DNA, 15 bp, Homo sapiens
aacttttacagtgat

SEQ ID NO: 79379 - DNA, 15 bp, Homo sapiens
acttttacagtgatt

SEQ ID NO: 79380 - DNA, 15 bp, Homo sapiens
cttttacagtgattt

SEQ ID NO: 79381 - DNA, 15 bp, Homo sapiens
ttttacagtgattta

SEQ ID NO: 79382 - DNA, 15 bp, Homo sapiens
tttacagtgatttaa

SEQ ID NO: 79383 - DNA, 15 bp, Homo sapiens
ttacagtgatttaat

SEQ ID NO: 79384 - DNA, 15 bp, Homo sapiens
tacagtgatttaatt

SEQ ID NO: 79385 - DNA, 15 bp, Homo sapiens
acagtgatttaattt

SEQ ID NO: 79386 - DNA, 15 bp, Homo sapiens
cagtgatttaatttt

SEQ ID NO: 79387 - DNA, 15 bp, Homo sapiens
agtgatttaattttg

SEQ ID NO: 79388 - DNA, 15 bp, Homo sapiens
gtgatttaattttgc

SEQ ID NO: 79389 - DNA, 15 bp, Homo sapiens
tgatttaattttgct

SEQ ID NO: 79390 - DNA, 15 bp, Homo sapiens
gatttaattttgctg

SEQ ID NO: 79391 - DNA, 15 bp, Homo sapiens
atttaattttgctgt

SEQ ID NO: 79392 - DNA, 15 bp, Homo sapiens
tttaattttgctgtt

SEQ ID NO: 79393 - DNA, 15 bp, Homo sapiens
ttaattttgctgttg

SEQ ID NO: 79394 - DNA, 15 bp, Homo sapiens
taattttgctgttga

SEQ ID NO: 79395 - DNA, 15 bp, Homo sapiens
aattttgctgttgat

SEQ ID NO: 79396 - DNA, 15 bp, Homo sapiens
attttgctgttgata

SEQ ID NO: 79397 - DNA, 15 bp, Homo sapiens
ttttgctgttgatat

SEQ ID NO: 79398 - DNA, 15 bp, Homo sapiens
tttgctgttgatata

SEQ ID NO: 79399 - DNA, 15 bp, Homo sapiens
ttgctgttgatatat

SEQ ID NO: 79400 - DNA, 15 bp, Homo sapiens
tgctgttgatatatt

SEQ ID NO: 79401 - DNA, 15 bp, Homo sapiens
gctgttgatatattt

SEQ ID NO: 79402 - DNA, 15 bp, Homo sapiens
ctgttgatatatttc

SEQ ID NO: 79403 - DNA, 15 bp, Homo sapiens
tgttgatatatttct

SEQ ID NO: 79404 - DNA, 15 bp, Homo sapiens
gttgatatatttctt

SEQ ID NO: 79405 - DNA, 15 bp, Homo sapiens
ttgatatatttcttt

SEQ ID NO: 79406 - DNA, 15 bp, Homo sapiens
tgatatatttctttg

SEQ ID NO: 79407 - DNA, 15 bp, Homo sapiens
gatatatttctttgg

SEQ ID NO: 79408 - DNA, 15 bp, Homo sapiens
atatatttctttggg

SEQ ID NO: 79409 - DNA, 15 bp, Homo sapiens
tatatttctttgggt

SEQ ID NO: 79410 - DNA, 15 bp, Homo sapiens
atatttctttgggtg

SEQ ID NO: 79411 - DNA, 15 bp, Homo sapiens
tatttctttgggtgg

SEQ ID NO: 79412 - DNA, 15 bp, Homo sapiens
atttctttgggtggt

SEQ ID NO: 79413 - DNA, 15 bp, Homo sapiens
tttctttgggtggta

SEQ ID NO: 79414 - DNA, 15 bp, Homo sapiens
ttctttgggtggtaa

SEQ ID NO: 79415 - DNA, 15 bp, Homo sapiens
tctttgggtggtaag

SEQ ID NO: 79416 - DNA, 15 bp, Homo sapiens
ctttgggtggtaagt

SEQ ID NO: 79417 - DNA, 15 bp, Homo sapiens
tttgggtggtaagta

SEQ ID NO: 79418 - DNA, 15 bp, Homo sapiens
ttgggtggtaagtat

SEQ ID NO: 79419 - DNA, 15 bp, Homo sapiens
tgggtggtaagtatg

SEQ ID NO: 79420 - DNA, 15 bp, Homo sapiens
gggtggtaagtatgg

SEQ ID NO: 79421 - DNA, 15 bp, Homo sapiens
ggtggtaagtatggc

SEQ ID NO: 79422 - DNA, 15 bp, Homo sapiens
gtggtaagtatggca

SEQ ID NO: 79423 - DNA, 15 bp, Homo sapiens
tggtaagtatggcaa

SEQ ID NO: 79424 - DNA, 15 bp, Homo sapiens
ggtaagtatggcaaa

SEQ ID NO: 79425 - DNA, 15 bp, Homo sapiens
gtaagtatggcaaaa

SEQ ID NO: 79426 - DNA, 15 bp, Homo sapiens
taagtatggcaaaac

SEQ ID NO: 79427 - DNA, 15 bp, Homo sapiens
aagtatggcaaaaca

SEQ ID NO: 79428 - DNA, 15 bp, Homo sapiens
agtatggcaaaacat

SEQ ID NO: 79429 - DNA, 15 bp, Homo sapiens
gtatggcaaaacatg

SEQ ID NO: 79430 - DNA, 15 bp, Homo sapiens
tatggcaaaacatgt

SEQ ID NO: 79431 - DNA, 15 bp, Homo sapiens
atggcaaaacatgtt

SEQ ID NO: 79432 - DNA, 15 bp, Homo sapiens
tggcaaaacatgtta

SEQ ID NO: 79433 - DNA, 15 bp, Homo sapiens
ggcaaaacatgttaa

SEQ ID NO: 79434 - DNA, 15 bp, Homo sapiens
gcaaaacatgttaaa

SEQ ID NO: 79435 - DNA, 15 bp, Homo sapiens
caaaacatgttaaaa

SEQ ID NO: 79436 - DNA, 15 bp, Homo sapiens
aaaacatgttaaaat

SEQ ID NO: 79437 - DNA, 15 bp, Homo sapiens
aaacatgttaaaatt

SEQ ID NO: 79438 - DNA, 15 bp, Homo sapiens
aacatgttaaaattt

SEQ ID NO: 79439 - DNA, 15 bp, Homo sapiens
acatgttaaaattta

SEQ ID NO: 79440 - DNA, 15 bp, Homo sapiens
catgttaaaatttaa

SEQ ID NO: 79441 - DNA, 15 bp, Homo sapiens
atgttaaaatttaat

SEQ ID NO: 79442 - DNA, 15 bp, Homo sapiens
tgttaaaatttaatg

SEQ ID NO: 79443 - DNA, 15 bp, Homo sapiens
gttaaaatttaatgc

SEQ ID NO: 79444 - DNA, 15 bp, Homo sapiens
ttaaaatttaatgca

SEQ ID NO: 79445 - DNA, 15 bp, Homo sapiens
taaaatttaatgcaa

SEQ ID NO: 79446 - DNA, 15 bp, Homo sapiens
aaaatttaatgcaaa

SEQ ID NO: 79447 - DNA, 15 bp, Homo sapiens
aaatttaatgcaaag

SEQ ID NO: 79448 - DNA, 15 bp, Homo sapiens
aatttaatgcaaaga

SEQ ID NO: 79449 - DNA, 15 bp, Homo sapiens
atttaatgcaaagag

SEQ ID NO: 79450 - DNA, 15 bp, Homo sapiens
tttaatgcaaagaga

SEQ ID NO: 79451 - DNA, 15 bp, Homo sapiens
ttaatgcaaagagat

SEQ ID NO: 79452 - DNA, 15 bp, Homo sapiens
taatgcaaagagatt

SEQ ID NO: 79453 - DNA, 15 bp, Homo sapiens
aatgcaaagagattt

SEQ ID NO: 79454 - DNA, 15 bp, Homo sapiens
atgcaaagagatttt

SEQ ID NO: 79455 - DNA, 15 bp, Homo sapiens
tgcaaagagattttg

SEQ ID NO: 79456 - DNA, 15 bp, Homo sapiens
gcaaagagattttgt

SEQ ID NO: 79457 - DNA, 15 bp, Homo sapiens
caaagagattttgta

SEQ ID NO: 79458 - DNA, 15 bp, Homo sapiens
aaagagattttgtac

SEQ ID NO: 79459 - DNA, 15 bp, Homo sapiens
aagagattttgtaca

SEQ ID NO: 79460 - DNA, 15 bp, Homo sapiens
agagattttgtacat

SEQ ID NO: 79461 - DNA, 15 bp, Homo sapiens
gagattttgtacatt

SEQ ID NO: 79462 - DNA, 15 bp, Homo sapiens
agattttgtacattt

SEQ ID NO: 79463 - DNA, 15 bp, Homo sapiens
gattttgtacatttt

SEQ ID NO: 79464 - DNA, 15 bp, Homo sapiens
attttgtacattttt

SEQ ID NO: 79465 - DNA, 15 bp, Homo sapiens
ttttgtacatttttc

SEQ ID NO: 79466 - DNA, 15 bp, Homo sapiens
tttgtacatttttcc

SEQ ID NO: 79467 - DNA, 15 bp, Homo sapiens
ttgtacatttttcca

SEQ ID NO: 79468 - DNA, 15 bp, Homo sapiens
tgtacatttttccat

SEQ ID NO: 79469 - DNA, 15 bp, Homo sapiens
gtacatttttccatc

SEQ ID NO: 79470 - DNA, 15 bp, Homo sapiens
tacatttttccatct

SEQ ID NO: 79471 - DNA, 15 bp, Homo sapiens
acatttttccatctc

SEQ ID NO: 79472 - DNA, 15 bp, Homo sapiens
catttttccatctct

SEQ ID NO: 79473 - DNA, 15 bp, Homo sapiens
atttttccatctcta

SEQ ID NO: 79474 - DNA, 15 bp, Homo sapiens
tttttccatctctaa

SEQ ID NO: 79475 - DNA, 15 bp, Homo sapiens
ttttccatctctaag

SEQ ID NO: 79476 - DNA, 15 bp, Homo sapiens
tttccatctctaaga

SEQ ID NO: 79477 - DNA, 15 bp, Homo sapiens
ttccatctctaagaa

SEQ ID NO: 79478 - DNA, 15 bp, Homo sapiens
tccatctctaagaag

SEQ ID NO: 79479 - DNA, 15 bp, Homo sapiens
ccatctctaagaagg

SEQ ID NO: 79480 - DNA, 15 bp, Homo sapiens
catctctaagaagga

SEQ ID NO: 79481 - DNA, 15 bp, Homo sapiens
atctctaagaaggac

SEQ ID NO: 79482 - DNA, 15 bp, Homo sapiens
tctctaagaaggaca

SEQ ID NO: 79483 - DNA, 15 bp, Homo sapiens
ctctaagaaggacaa

SEQ ID NO: 79484 - DNA, 15 bp, Homo sapiens
tctaagaaggacaaa

SEQ ID NO: 79485 - DNA, 15 bp, Homo sapiens
ctaagaaggacaaag

SEQ ID NO: 79486 - DNA, 15 bp, Homo sapiens
taagaaggacaaagc

SEQ ID NO: 79487 - DNA, 15 bp, Homo sapiens
aagaaggacaaagcc

SEQ ID NO: 79488 - DNA, 15 bp, Homo sapiens
agaaggacaaagcct

SEQ ID NO: 79489 - DNA, 15 bp, Homo sapiens
gaaggacaaagccta

SEQ ID NO: 79490 - DNA, 15 bp, Homo sapiens
aaggacaaagcctaa

SEQ ID NO: 79491 - DNA, 15 bp, Homo sapiens
aggacaaagcctaag

SEQ ID NO: 79492 - DNA, 15 bp, Homo sapiens
ggacaaagcctaagc

SEQ ID NO: 79493 - DNA, 15 bp, Homo sapiens
gacaaagcctaagcc

SEQ ID NO: 79494 - DNA, 15 bp, Homo sapiens
acaaagcctaagccc

SEQ ID NO: 79495 - DNA, 15 bp, Homo sapiens
caaagcctaagcccc

SEQ ID NO: 79496 - DNA, 15 bp, Homo sapiens
aaagcctaagcccct

SEQ ID NO: 79497 - DNA, 15 bp, Homo sapiens
aagcctaagcccctc

SEQ ID NO: 79498 - DNA, 15 bp, Homo sapiens
agcctaagcccctcc

SEQ ID NO: 79499 - DNA, 15 bp, Homo sapiens
gcctaagcccctcca

SEQ ID NO: 79500 - DNA, 15 bp, Homo sapiens
cctaagcccctccag

SEQ ID NO: 79501 - DNA, 15 bp, Homo sapiens
ctaagcccctccaga

SEQ ID NO: 79502 - DNA, 15 bp, Homo sapiens
taagcccctccagat

SEQ ID NO: 79503 - DNA, 15 bp, Homo sapiens
aagcccctccagata

SEQ ID NO: 79504 - DNA, 15 bp, Homo sapiens
agcccctccagatag

SEQ ID NO: 79505 - DNA, 15 bp, Homo sapiens
gcccctccagataga

SEQ ID NO: 79506 - DNA, 15 bp, Homo sapiens
cccctccagatagat

SEQ ID NO: 79507 - DNA, 15 bp, Homo sapiens
ccctccagatagata

SEQ ID NO: 79508 - DNA, 15 bp, Homo sapiens
cctccagatagatag

SEQ ID NO: 79509 - DNA, 15 bp, Homo sapiens
ctccagatagataga

SEQ ID NO: 79510 - DNA, 15 bp, Homo sapiens
tccagatagatagaa

SEQ ID NO: 79511 - DNA, 15 bp, Homo sapiens
ccagatagatagaaa

SEQ ID NO: 79512 - DNA, 15 bp, Homo sapiens
cagatagatagaaaa

SEQ ID NO: 79513 - DNA, 15 bp, Homo sapiens
agatagatagaaaaa

SEQ ID NO: 79514 - DNA, 15 bp, Homo sapiens
gatagatagaaaaac

SEQ ID NO: 79515 - DNA, 15 bp, Homo sapiens
atagatagaaaaact

SEQ ID NO: 79516 - DNA, 15 bp, Homo sapiens
tagatagaaaaactc

SEQ ID NO: 79517 - DNA, 15 bp, Homo sapiens
agatagaaaaactca

SEQ ID NO: 79518 - DNA, 15 bp, Homo sapiens
gatagaaaaactcat

SEQ ID NO: 79519 - DNA, 15 bp, Homo sapiens
atagaaaaactcatt

SEQ ID NO: 79520 - DNA, 15 bp, Homo sapiens
tagaaaaactcattt

SEQ ID NO: 79521 - DNA, 15 bp, Homo sapiens
agaaaaactcattta

SEQ ID NO: 79522 - DNA, 15 bp, Homo sapiens
gaaaaactcatttag

SEQ ID NO: 79523 - DNA, 15 bp, Homo sapiens
aaaaactcatttaga

SEQ ID NO: 79524 - DNA, 15 bp, Homo sapiens
aaaactcatttagag

SEQ ID NO: 79525 - DNA, 15 bp, Homo sapiens
aaactcatttagaga

SEQ ID NO: 79526 - DNA, 15 bp, Homo sapiens
aactcatttagagag

SEQ ID NO: 79527 - DNA, 15 bp, Homo sapiens
actcatttagagagt

SEQ ID NO: 79528 - DNA, 15 bp, Homo sapiens
ctcatttagagagtt

SEQ ID NO: 79529 - DNA, 15 bp, Homo sapiens
tcatttagagagttc

SEQ ID NO: 79530 - DNA, 15 bp, Homo sapiens
catttagagagttct

SEQ ID NO: 79531 - DNA, 15 bp, Homo sapiens
atttagagagttctc

SEQ ID NO: 79532 - DNA, 15 bp, Homo sapiens
tttagagagttctcc

SEQ ID NO: 79533 - DNA, 15 bp, Homo sapiens
ttagagagttctcct

SEQ ID NO: 79534 - DNA, 15 bp, Homo sapiens
tagagagttctcctt

SEQ ID NO: 79535 - DNA, 15 bp, Homo sapiens
agagagttctccttc

SEQ ID NO: 79536 - DNA, 15 bp, Homo sapiens
gagagttctccttca

SEQ ID NO: 79537 - DNA, 15 bp, Homo sapiens
agagttctccttcat

SEQ ID NO: 79538 - DNA, 15 bp, Homo sapiens
gagttctccttcatg

SEQ ID NO: 79539 - DNA, 15 bp, Homo sapiens
agttctccttcatgt

SEQ ID NO: 79540 - DNA, 15 bp, Homo sapiens
gttctccttcatgtt

SEQ ID NO: 79541 - DNA, 15 bp, Homo sapiens
ttctccttcatgtta

SEQ ID NO: 79542 - DNA, 15 bp, Homo sapiens
tctccttcatgttaa

SEQ ID NO: 79543 - DNA, 15 bp, Homo sapiens
ctccttcatgttaat

SEQ ID NO: 79544 - DNA, 15 bp, Homo sapiens
tccttcatgttaatc

SEQ ID NO: 79545 - DNA, 15 bp, Homo sapiens
ccttcatgttaatct

SEQ ID NO: 79546 - DNA, 15 bp, Homo sapiens
cttcatgttaatcta

SEQ ID NO: 79547 - DNA, 15 bp, Homo sapiens
ttcatgttaatctaa

SEQ ID NO: 79548 - DNA, 15 bp, Homo sapiens
tcatgttaatctaat

SEQ ID NO: 79549 - DNA, 15 bp, Homo sapiens
catgttaatctaatt

SEQ ID NO: 79550 - DNA, 15 bp, Homo sapiens
atgttaatctaattt

SEQ ID NO: 79551 - DNA, 15 bp, Homo sapiens
tgttaatctaatttc

SEQ ID NO: 79552 - DNA, 15 bp, Homo sapiens
gttaatctaatttct

SEQ ID NO: 79553 - DNA, 15 bp, Homo sapiens
ttaatctaatttctt

SEQ ID NO: 79554 - DNA, 15 bp, Homo sapiens
taatctaatttcttc

SEQ ID NO: 79555 - DNA, 15 bp, Homo sapiens
aatctaatttcttct

SEQ ID NO: 79556 - DNA, 15 bp, Homo sapiens
atctaatttcttctt

SEQ ID NO: 79557 - DNA, 15 bp, Homo sapiens
tctaatttcttctta

SEQ ID NO: 79558 - DNA, 15 bp, Homo sapiens
ctaatttcttcttaa

SEQ ID NO: 79559 - DNA, 15 bp, Homo sapiens
taatttcttcttaat

SEQ ID NO: 79560 - DNA, 15 bp, Homo sapiens
aatttcttcttaatt

SEQ ID NO: 79561 - DNA, 15 bp, Homo sapiens
atttcttcttaattc

SEQ ID NO: 79562 - DNA, 15 bp, Homo sapiens
tttcttcttaattca

SEQ ID NO: 79563 - DNA, 15 bp, Homo sapiens
ttcttcttaattcag

SEQ ID NO: 79564 - DNA, 15 bp, Homo sapiens
tcttcttaattcagc

SEQ ID NO: 79565 - DNA, 15 bp, Homo sapiens
cttcttaattcagct

SEQ ID NO: 79566 - DNA, 15 bp, Homo sapiens
ttcttaattcagctg

SEQ ID NO: 79567 - DNA, 15 bp, Homo sapiens
tcttaattcagctgt

SEQ ID NO: 79568 - DNA, 15 bp, Homo sapiens
cttaattcagctgta

SEQ ID NO: 79569 - DNA, 15 bp, Homo sapiens
ttaattcagctgtaa

SEQ ID NO: 79570 - DNA, 15 bp, Homo sapiens
taattcagctgtaaa

SEQ ID NO: 79571 - DNA, 15 bp, Homo sapiens
aattcagctgtaaaa

SEQ ID NO: 79572 - DNA, 15 bp, Homo sapiens
attcagctgtaaaac

SEQ ID NO: 79573 - DNA, 15 bp, Homo sapiens
ttcagctgtaaaaca

SEQ ID NO: 79574 - DNA, 15 bp, Homo sapiens
tcagctgtaaaacag

SEQ ID NO: 79575 - DNA, 15 bp, Homo sapiens
cagctgtaaaacaga

SEQ ID NO: 79576 - DNA, 15 bp, Homo sapiens
agctgtaaaacagaa

SEQ ID NO: 79577 - DNA, 15 bp, Homo sapiens
gctgtaaaacagaaa

SEQ ID NO: 79578 - DNA, 15 bp, Homo sapiens
ctgtaaaacagaaat

SEQ ID NO: 79579 - DNA, 15 bp, Homo sapiens
tgtaaaacagaaata

SEQ ID NO: 79580 - DNA, 15 bp, Homo sapiens
gtaaaacagaaatag

SEQ ID NO: 79581 - DNA, 15 bp, Homo sapiens
taaaacagaaataga

SEQ ID NO: 79582 - DNA, 15 bp, Homo sapiens
aaaacagaaatagaa

SEQ ID NO: 79583 - DNA, 15 bp, Homo sapiens
aaacagaaatagaat

SEQ ID NO: 79584 - DNA, 15 bp, Homo sapiens
aacagaaatagaatg

SEQ ID NO: 79585 - DNA, 15 bp, Homo sapiens
acagaaatagaatga

SEQ ID NO: 79586 - DNA, 15 bp, Homo sapiens
cagaaatagaatgat

SEQ ID NO: 79587 - DNA, 15 bp, Homo sapiens
agaaatagaatgatc

SEQ ID NO: 79588 - DNA, 15 bp, Homo sapiens
gaaatagaatgatcg

SEQ ID NO: 79589 - DNA, 15 bp, Homo sapiens
aaatagaatgatcgt

SEQ ID NO: 79590 - DNA, 15 bp, Homo sapiens
aatagaatgatcgta

SEQ ID NO: 79591 - DNA, 15 bp, Homo sapiens
atagaatgatcgtat

SEQ ID NO: 79592 - DNA, 15 bp, Homo sapiens
tagaatgatcgtatt

SEQ ID NO: 79593 - DNA, 15 bp, Homo sapiens
agaatgatcgtatta

SEQ ID NO: 79594 - DNA, 15 bp, Homo sapiens
gaatgatcgtattaa

SEQ ID NO: 79595 - DNA, 15 bp, Homo sapiens
aatgatcgtattaat

SEQ ID NO: 79596 - DNA, 15 bp, Homo sapiens
atgatcgtattaatc

SEQ ID NO: 79597 - DNA, 15 bp, Homo sapiens
tgatcgtattaatca

SEQ ID NO: 79598 - DNA, 15 bp, Homo sapiens
gatcgtattaatcat

SEQ ID NO: 79599 - DNA, 15 bp, Homo sapiens
atcgtattaatcatt

SEQ ID NO: 79600 - DNA, 15 bp, Homo sapiens
tcgtattaatcattt

SEQ ID NO: 79601 - DNA, 15 bp, Homo sapiens
cgtattaatcattta

SEQ ID NO: 79602 - DNA, 15 bp, Homo sapiens
gtattaatcatttaa

SEQ ID NO: 79603 - DNA, 15 bp, Homo sapiens
tattaatcatttaaa

SEQ ID NO: 79604 - DNA, 15 bp, Homo sapiens
attaatcatttaaag

SEQ ID NO: 79605 - DNA, 15 bp, Homo sapiens
ttaatcatttaaagc

SEQ ID NO: 79606 - DNA, 15 bp, Homo sapiens
taatcatttaaagct

SEQ ID NO: 79607 - DNA, 15 bp, Homo sapiens
aatcatttaaagctg

SEQ ID NO: 79608 - DNA, 15 bp, Homo sapiens
atcatttaaagctgt

SEQ ID NO: 79609 - DNA, 15 bp, Homo sapiens
tcatttaaagctgtg

SEQ ID NO: 79610 - DNA, 15 bp, Homo sapiens
catttaaagctgtgt

SEQ ID NO: 79611 - DNA, 15 bp, Homo sapiens
atttaaagctgtgta

SEQ ID NO: 79612 - DNA, 15 bp, Homo sapiens
tttaaagctgtgtaa

SEQ ID NO: 79613 - DNA, 15 bp, Homo sapiens
ttaaagctgtgtaat

SEQ ID NO: 79614 - DNA, 15 bp, Homo sapiens
taaagctgtgtaatt

SEQ ID NO: 79615 - DNA, 15 bp, Homo sapiens
aaagctgtgtaattg

SEQ ID NO: 79616 - DNA, 15 bp, Homo sapiens
aagctgtgtaattgc

SEQ ID NO: 79617 - DNA, 15 bp, Homo sapiens
agctgtgtaattgca

SEQ ID NO: 79618 - DNA, 15 bp, Homo sapiens
gctgtgtaattgcat

SEQ ID NO: 79619 - DNA, 15 bp, Homo sapiens
ctgtgtaattgcata

SEQ ID NO: 79620 - DNA, 15 bp, Homo sapiens
tgtgtaattgcatag

SEQ ID NO: 79621 - DNA, 15 bp, Homo sapiens
gtgtaattgcataga

SEQ ID NO: 79622 - DNA, 15 bp, Homo sapiens
tgtaattgcatagat

SEQ ID NO: 79623 - DNA, 15 bp, Homo sapiens
gtaattgcatagatt

SEQ ID NO: 79624 - DNA, 15 bp, Homo sapiens
taattgcatagattc

SEQ ID NO: 79625 - DNA, 15 bp, Homo sapiens
aattgcatagattcc

SEQ ID NO: 79626 - DNA, 15 bp, Homo sapiens
attgcatagattcct

SEQ ID NO: 79627 - DNA, 15 bp, Homo sapiens
ttgcatagattcctt

SEQ ID NO: 79628 - DNA, 15 bp, Homo sapiens
tgcatagattccttg

SEQ ID NO: 79629 - DNA, 15 bp, Homo sapiens
gcatagattccttgt

SEQ ID NO: 79630 - DNA, 15 bp, Homo sapiens
catagattccttgtt

SEQ ID NO: 79631 - DNA, 15 bp, Homo sapiens
atagattccttgttc

SEQ ID NO: 79632 - DNA, 15 bp, Homo sapiens
tagattccttgttcc

SEQ ID NO: 79633 - DNA, 15 bp, Homo sapiens
agattccttgttcct

SEQ ID NO: 79634 - DNA, 15 bp, Homo sapiens
gattccttgttcctt

SEQ ID NO: 79635 - DNA, 15 bp, Homo sapiens
attccttgttccttt

SEQ ID NO: 79636 - DNA, 15 bp, Homo sapiens
ttccttgttccttta

SEQ ID NO: 79637 - DNA, 15 bp, Homo sapiens
tccttgttcctttac

SEQ ID NO: 79638 - DNA, 15 bp, Homo sapiens
ccttgttcctttacc

SEQ ID NO: 79639 - DNA, 15 bp, Homo sapiens
cttgttcctttaccc

SEQ ID NO: 79640 - DNA, 15 bp, Homo sapiens
ttgttcctttacccc

SEQ ID NO: 79641 - DNA, 15 bp, Homo sapiens
tgttcctttaccccc

SEQ ID NO: 79642 - DNA, 15 bp, Homo sapiens
gttcctttaccccct

SEQ ID NO: 79643 - DNA, 15 bp, Homo sapiens
ttcctttaccccctc

SEQ ID NO: 79644 - DNA, 15 bp, Homo sapiens
tcctttaccccctct

SEQ ID NO: 79645 - DNA, 15 bp, Homo sapiens
cctttaccccctctt

SEQ ID NO: 79646 - DNA, 15 bp, Homo sapiens
ctttaccccctctta

SEQ ID NO: 79647 - DNA, 15 bp, Homo sapiens
tttaccccctcttat

SEQ ID NO: 79648 - DNA, 15 bp, Homo sapiens
ttaccccctcttata

SEQ ID NO: 79649 - DNA, 15 bp, Homo sapiens
taccccctcttatat

SEQ ID NO: 79650 - DNA, 15 bp, Homo sapiens
accccctcttatatc

SEQ ID NO: 79651 - DNA, 15 bp, Homo sapiens
ccccctcttatatct

SEQ ID NO: 79652 - DNA, 15 bp, Homo sapiens
cccctcttatatctt

SEQ ID NO: 79653 - DNA, 15 bp, Homo sapiens
ccctcttatatcttg

SEQ ID NO: 79654 - DNA, 15 bp, Homo sapiens
cctcttatatcttgt

SEQ ID NO: 79655 - DNA, 15 bp, Homo sapiens
ctcttatatcttgtt

SEQ ID NO: 79656 - DNA, 15 bp, Homo sapiens
tcttatatcttgttt

SEQ ID NO: 79657 - DNA, 15 bp, Homo sapiens
cttatatcttgtttc

SEQ ID NO: 79658 - DNA, 15 bp, Homo sapiens
ttatatcttgtttcc

SEQ ID NO: 79659 - DNA, 15 bp, Homo sapiens
tatatcttgtttcct

SEQ ID NO: 79660 - DNA, 15 bp, Homo sapiens
atatcttgtttccta

SEQ ID NO: 79661 - DNA, 15 bp, Homo sapiens
tatcttgtttcctat

SEQ ID NO: 79662 - DNA, 15 bp, Homo sapiens
atcttgtttcctatc

SEQ ID NO: 79663 - DNA, 15 bp, Homo sapiens
tcttgtttcctatcc

SEQ ID NO: 79664 - DNA, 15 bp, Homo sapiens
cttgtttcctatcct

SEQ ID NO: 79665 - DNA, 15 bp, Homo sapiens
ttgtttcctatcctt

SEQ ID NO: 79666 - DNA, 15 bp, Homo sapiens
tgtttcctatccttt

SEQ ID NO: 79667 - DNA, 15 bp, Homo sapiens
gtttcctatcctttg

SEQ ID NO: 79668 - DNA, 15 bp, Homo sapiens
tttcctatcctttgt

SEQ ID NO: 79669 - DNA, 15 bp, Homo sapiens
ttcctatcctttgtg

SEQ ID NO: 79670 - DNA, 15 bp, Homo sapiens
tcctatcctttgtga

SEQ ID NO: 79671 - DNA, 15 bp, Homo sapiens
cctatcctttgtgac

SEQ ID NO: 79672 - DNA, 15 bp, Homo sapiens
ctatcctttgtgact

SEQ ID NO: 79673 - DNA, 15 bp, Homo sapiens
tatcctttgtgactt

SEQ ID NO: 79674 - DNA, 15 bp, Homo sapiens
atcctttgtgacttt

SEQ ID NO: 79675 - DNA, 15 bp, Homo sapiens
tcctttgtgactttt

SEQ ID NO: 79676 - DNA, 15 bp, Homo sapiens
cctttgtgacttttt

SEQ ID NO: 79677 - DNA, 15 bp, Homo sapiens
ctttgtgactttttt

SEQ ID NO: 79678 - DNA, 15 bp, Homo sapiens
tttgtgacttttttt

SEQ ID NO: 79679 - DNA, 15 bp, Homo sapiens
ttgtgactttttttg

SEQ ID NO: 79680 - DNA, 15 bp, Homo sapiens
tgtgactttttttgc

SEQ ID NO: 79681 - DNA, 15 bp, Homo sapiens
gtgactttttttgca

SEQ ID NO: 79682 - DNA, 15 bp, Homo sapiens
tgactttttttgcat

SEQ ID NO: 79683 - DNA, 15 bp, Homo sapiens
gactttttttgcatt

SEQ ID NO: 79684 - DNA, 15 bp, Homo sapiens
actttttttgcatta

SEQ ID NO: 79685 - DNA, 15 bp, Homo sapiens
ctttttttgcattat

SEQ ID NO: 79686 - DNA, 15 bp, Homo sapiens
tttttttgcattata

SEQ ID NO: 79687 - DNA, 15 bp, Homo sapiens
ttttttgcattatat

SEQ ID NO: 79688 - DNA, 15 bp, Homo sapiens
tttttgcattatata

SEQ ID NO: 79689 - DNA, 15 bp, Homo sapiens
ttttgcattatatat

SEQ ID NO: 79690 - DNA, 15 bp, Homo sapiens
tttgcattatatata

SEQ ID NO: 79691 - DNA, 15 bp, Homo sapiens
ttgcattatatataa

SEQ ID NO: 79692 - DNA, 15 bp, Homo sapiens
tgcattatatataag

SEQ ID NO: 79693 - DNA, 15 bp, Homo sapiens
gcattatatataagg

SEQ ID NO: 79694 - DNA, 15 bp, Homo sapiens
cattatatataagga

SEQ ID NO: 79695 - DNA, 15 bp, Homo sapiens
attatatataaggat

SEQ ID NO: 79696 - DNA, 15 bp, Homo sapiens
ttatatataaggatg

SEQ ID NO: 79697 - DNA, 15 bp, Homo sapiens
tatatataaggatgc

SEQ ID NO: 79698 - DNA, 15 bp, Homo sapiens
atatataaggatgcc

SEQ ID NO: 79699 - DNA, 15 bp, Homo sapiens
tatataaggatgccg

SEQ ID NO: 79700 - DNA, 15 bp, Homo sapiens
atataaggatgccga

SEQ ID NO: 79701 - DNA, 15 bp, Homo sapiens
tataaggatgccgaa

SEQ ID NO: 79702 - DNA, 15 bp, Homo sapiens
ataaggatgccgaaa

SEQ ID NO: 79703 - DNA, 15 bp, Homo sapiens
taaggatgccgaaat

SEQ ID NO: 79704 - DNA, 15 bp, Homo sapiens
aaggatgccgaaata

SEQ ID NO: 79705 - DNA, 15 bp, Homo sapiens
aggatgccgaaatac

SEQ ID NO: 79706 - DNA, 15 bp, Homo sapiens
ggatgccgaaatact

SEQ ID NO: 79707 - DNA, 15 bp, Homo sapiens
gatgccgaaatactg

SEQ ID NO: 79708 - DNA, 15 bp, Homo sapiens
atgccgaaatactgt

SEQ ID NO: 79709 - DNA, 15 bp, Homo sapiens
tgccgaaatactgtt

SEQ ID NO: 79710 - DNA, 15 bp, Homo sapiens
gccgaaatactgttt

SEQ ID NO: 79711 - DNA, 15 bp, Homo sapiens
ccgaaatactgttta

SEQ ID NO: 79712 - DNA, 15 bp, Homo sapiens
cgaaatactgtttat

SEQ ID NO: 79713 - DNA, 15 bp, Homo sapiens
gaaatactgtttatt

SEQ ID NO: 79714 - DNA, 15 bp, Homo sapiens
aaatactgtttattg

SEQ ID NO: 79715 - DNA, 15 bp, Homo sapiens
aatactgtttattgt

SEQ ID NO: 79716 - DNA, 15 bp, Homo sapiens
atactgtttattgtt

SEQ ID NO: 79717 - DNA, 15 bp, Homo sapiens
tactgtttattgttg

SEQ ID NO: 79718 - DNA, 15 bp, Homo sapiens
actgtttattgttga

SEQ ID NO: 79719 - DNA, 15 bp, Homo sapiens
ctgtttattgttgat

SEQ ID NO: 79720 - DNA, 15 bp, Homo sapiens
tgtttattgttgata

SEQ ID NO: 79721 - DNA, 15 bp, Homo sapiens
gtttattgttgatag

SEQ ID NO: 79722 - DNA, 15 bp, Homo sapiens
tttattgttgatagt

SEQ ID NO: 79723 - DNA, 15 bp, Homo sapiens
ttattgttgatagtt

SEQ ID NO: 79724 - DNA, 15 bp, Homo sapiens
tattgttgatagttt

SEQ ID NO: 79725 - DNA, 15 bp, Homo sapiens
attgttgatagttta

SEQ ID NO: 79726 - DNA, 15 bp, Homo sapiens
ttgttgatagtttac

SEQ ID NO: 79727 - DNA, 15 bp, Homo sapiens
tgttgatagtttaca

SEQ ID NO: 79728 - DNA, 15 bp, Homo sapiens
gttgatagtttacaa

SEQ ID NO: 79729 - DNA, 15 bp, Homo sapiens
ttgatagtttacaaa

SEQ ID NO: 79730 - DNA, 15 bp, Homo sapiens
tgatagtttacaaaa

SEQ ID NO: 79731 - DNA, 15 bp, Homo sapiens
gatagtttacaaaat

SEQ ID NO: 79732 - DNA, 15 bp, Homo sapiens
atagtttacaaaatt

SEQ ID NO: 79733 - DNA, 15 bp, Homo sapiens
tagtttacaaaattg

SEQ ID NO: 79734 - DNA, 15 bp, Homo sapiens
agtttacaaaattga

SEQ ID NO: 79735 - DNA, 15 bp, Homo sapiens
gtttacaaaattgaa

SEQ ID NO: 79736 - DNA, 15 bp, Homo sapiens
tttacaaaattgaat

SEQ ID NO: 79737 - DNA, 15 bp, Homo sapiens
ttacaaaattgaatc

SEQ ID NO: 79738 - DNA, 15 bp, Homo sapiens
tacaaaattgaatct

SEQ ID NO: 79739 - DNA, 15 bp, Homo sapiens
acaaaattgaatctt

SEQ ID NO: 79740 - DNA, 15 bp, Homo sapiens
caaaattgaatctta

SEQ ID NO: 79741 - DNA, 15 bp, Homo sapiens
aaaattgaatcttac

SEQ ID NO: 79742 - DNA, 15 bp, Homo sapiens
aaattgaatcttaca

SEQ ID NO: 79743 - DNA, 15 bp, Homo sapiens
aattgaatcttacat

SEQ ID NO: 79744 - DNA, 15 bp, Homo sapiens
attgaatcttacatt

SEQ ID NO: 79745 - DNA, 15 bp, Homo sapiens
ttgaatcttacatta

SEQ ID NO: 79746 - DNA, 15 bp, Homo sapiens
tgaatcttacattag

SEQ ID NO: 79747 - DNA, 15 bp, Homo sapiens
gaatcttacattagt

SEQ ID NO: 79748 - DNA, 15 bp, Homo sapiens
aatcttacattagtg

SEQ ID NO: 79749 - DNA, 15 bp, Homo sapiens
atcttacattagtgc

SEQ ID NO: 79750 - DNA, 15 bp, Homo sapiens
tcttacattagtgca

SEQ ID NO: 79751 - DNA, 15 bp, Homo sapiens
cttacattagtgcat

SEQ ID NO: 79752 - DNA, 15 bp, Homo sapiens
ttacattagtgcata

SEQ ID NO: 79753 - DNA, 15 bp, Homo sapiens
tacattagtgcataa

SEQ ID NO: 79754 - DNA, 15 bp, Homo sapiens
acattagtgcataat

SEQ ID NO: 79755 - DNA, 15 bp, Homo sapiens
cattagtgcataatt

SEQ ID NO: 79756 - DNA, 15 bp, Homo sapiens
attagtgcataattt

SEQ ID NO: 79757 - DNA, 15 bp, Homo sapiens
ttagtgcataatttt

SEQ ID NO: 79758 - DNA, 15 bp, Homo sapiens
tagtgcataattttg

SEQ ID NO: 79759 - DNA, 15 bp, Homo sapiens
agtgcataattttgg

SEQ ID NO: 79760 - DNA, 15 bp, Homo sapiens
gtgcataattttggt

SEQ ID NO: 79761 - DNA, 15 bp, Homo sapiens
tgcataattttggtg

SEQ ID NO: 79762 - DNA, 15 bp, Homo sapiens
gcataattttggtga

SEQ ID NO: 79763 - DNA, 15 bp, Homo sapiens
cataattttggtgaa

SEQ ID NO: 79764 - DNA, 15 bp, Homo sapiens
ataattttggtgaat

SEQ ID NO: 79765 - DNA, 15 bp, Homo sapiens
taattttggtgaatg

SEQ ID NO: 79766 - DNA, 15 bp, Homo sapiens
aattttggtgaatgt

SEQ ID NO: 79767 - DNA, 15 bp, Homo sapiens
attttggtgaatgtt

SEQ ID NO: 79768 - DNA, 15 bp, Homo sapiens
ttttggtgaatgttg

SEQ ID NO: 79769 - DNA, 15 bp, Homo sapiens
tttggtgaatgttga

SEQ ID NO: 79770 - DNA, 15 bp, Homo sapiens
ttggtgaatgttgaa

SEQ ID NO: 79771 - DNA, 15 bp, Homo sapiens
tggtgaatgttgaag

SEQ ID NO: 79772 - DNA, 15 bp, Homo sapiens
ggtgaatgttgaaga

SEQ ID NO: 79773 - DNA, 15 bp, Homo sapiens
gtgaatgttgaagat

SEQ ID NO: 79774 - DNA, 15 bp, Homo sapiens
tgaatgttgaagatt

SEQ ID NO: 79775 - DNA, 15 bp, Homo sapiens
gaatgttgaagatta

SEQ ID NO: 79776 - DNA, 15 bp, Homo sapiens
aatgttgaagattat

SEQ ID NO: 79777 - DNA, 15 bp, Homo sapiens
atgttgaagattatg

SEQ ID NO: 79778 - DNA, 15 bp, Homo sapiens
tgttgaagattatgg

SEQ ID NO: 79779 - DNA, 15 bp, Homo sapiens
gttgaagattatggt

SEQ ID NO: 79780 - DNA, 15 bp, Homo sapiens
ttgaagattatggta

SEQ ID NO: 79781 - DNA, 15 bp, Homo sapiens
tgaagattatggtag

SEQ ID NO: 79782 - DNA, 15 bp, Homo sapiens
gaagattatggtaga

SEQ ID NO: 79783 - DNA, 15 bp, Homo sapiens
aagattatggtagat

SEQ ID NO: 79784 - DNA, 15 bp, Homo sapiens
agattatggtagatt

SEQ ID NO: 79785 - DNA, 15 bp, Homo sapiens
gattatggtagattg

SEQ ID NO: 79786 - DNA, 15 bp, Homo sapiens
attatggtagattgc

SEQ ID NO: 79787 - DNA, 15 bp, Homo sapiens
ttatggtagattgcc

SEQ ID NO: 79788 - DNA, 15 bp, Homo sapiens
tatggtagattgcct

SEQ ID NO: 79789 - DNA, 15 bp, Homo sapiens
atggtagattgcctt

SEQ ID NO: 79790 - DNA, 15 bp, Homo sapiens
tggtagattgcctta

SEQ ID NO: 79791 - DNA, 15 bp, Homo sapiens
ggtagattgccttac

SEQ ID NO: 79792 - DNA, 15 bp, Homo sapiens
gtagattgccttaca

SEQ ID NO: 79793 - DNA, 15 bp, Homo sapiens
tagattgccttacat

SEQ ID NO: 79794 - DNA, 15 bp, Homo sapiens
agattgccttacatt

SEQ ID NO: 79795 - DNA, 15 bp, Homo sapiens
gattgccttacattt

SEQ ID NO: 79796 - DNA, 15 bp, Homo sapiens
attgccttacatttc

SEQ ID NO: 79797 - DNA, 15 bp, Homo sapiens
ttgccttacatttct

SEQ ID NO: 79798 - DNA, 15 bp, Homo sapiens
tgccttacatttctg

SEQ ID NO: 79799 - DNA, 15 bp, Homo sapiens
gccttacatttctgc

SEQ ID NO: 79800 - DNA, 15 bp, Homo sapiens
ccttacatttctgca

SEQ ID NO: 79801 - DNA, 15 bp, Homo sapiens
cttacatttctgcat

SEQ ID NO: 79802 - DNA, 15 bp, Homo sapiens
ttacatttctgcata

SEQ ID NO: 79803 - DNA, 15 bp, Homo sapiens
tacatttctgcatat

SEQ ID NO: 79804 - DNA, 15 bp, Homo sapiens
acatttctgcatatt

SEQ ID NO: 79805 - DNA, 15 bp, Homo sapiens
catttctgcatattg

SEQ ID NO: 79806 - DNA, 15 bp, Homo sapiens
atttctgcatattgt

SEQ ID NO: 79807 - DNA, 15 bp, Homo sapiens
tttctgcatattgtt

SEQ ID NO: 79808 - DNA, 15 bp, Homo sapiens
ttctgcatattgttt

SEQ ID NO: 79809 - DNA, 15 bp, Homo sapiens
tctgcatattgtttg

SEQ ID NO: 79810 - DNA, 15 bp, Homo sapiens
ctgcatattgtttgc

SEQ ID NO: 79811 - DNA, 15 bp, Homo sapiens
tgcatattgtttgca

SEQ ID NO: 79812 - DNA, 15 bp, Homo sapiens
gcatattgtttgcac

SEQ ID NO: 79813 - DNA, 15 bp, Homo sapiens
catattgtttgcacc

SEQ ID NO: 79814 - DNA, 15 bp, Homo sapiens
atattgtttgcacct

SEQ ID NO: 79815 - DNA, 15 bp, Homo sapiens
tattgtttgcacctt

SEQ ID NO: 79816 - DNA, 15 bp, Homo sapiens
attgtttgcaccttg

SEQ ID NO: 79817 - DNA, 15 bp, Homo sapiens
ttgtttgcaccttgg

SEQ ID NO: 79818 - DNA, 15 bp, Homo sapiens
tgtttgcaccttgga

SEQ ID NO: 79819 - DNA, 15 bp, Homo sapiens
gtttgcaccttggaa

SEQ ID NO: 79820 - DNA, 15 bp, Homo sapiens
tttgcaccttggaat

SEQ ID NO: 79821 - DNA, 15 bp, Homo sapiens
ttgcaccttggaatg

SEQ ID NO: 79822 - DNA, 15 bp, Homo sapiens
tgcaccttggaatga

SEQ ID NO: 79823 - DNA, 15 bp, Homo sapiens
gcaccttggaatgat

SEQ ID NO: 79824 - DNA, 15 bp, Homo sapiens
caccttggaatgata

SEQ ID NO: 79825 - DNA, 15 bp, Homo sapiens
accttggaatgatag

SEQ ID NO: 79826 - DNA, 15 bp, Homo sapiens
ccttggaatgatagc

SEQ ID NO: 79827 - DNA, 15 bp, Homo sapiens
cttggaatgatagca

SEQ ID NO: 79828 - DNA, 15 bp, Homo sapiens
ttggaatgatagcac

SEQ ID NO: 79829 - DNA, 15 bp, Homo sapiens
tggaatgatagcact

SEQ ID NO: 79830 - DNA, 15 bp, Homo sapiens
ggaatgatagcactg

SEQ ID NO: 79831 - DNA, 15 bp, Homo sapiens
gaatgatagcactgg

SEQ ID NO: 79832 - DNA, 15 bp, Homo sapiens
aatgatagcactggc

SEQ ID NO: 79833 - DNA, 15 bp, Homo sapiens
atgatagcactggca

SEQ ID NO: 79834 - DNA, 15 bp, Homo sapiens
tgatagcactggcat

SEQ ID NO: 79835 - DNA, 15 bp, Homo sapiens
gatagcactggcatg

SEQ ID NO: 79836 - DNA, 15 bp, Homo sapiens
atagcactggcatga

SEQ ID NO: 79837 - DNA, 15 bp, Homo sapiens
tagcactggcatgaa

SEQ ID NO: 79838 - DNA, 15 bp, Homo sapiens
agcactggcatgaat

SEQ ID NO: 79839 - DNA, 15 bp, Homo sapiens
gcactggcatgaatt

SEQ ID NO: 79840 - DNA, 15 bp, Homo sapiens
cactggcatgaatta

SEQ ID NO: 79841 - DNA, 15 bp, Homo sapiens
actggcatgaattat

SEQ ID NO: 79842 - DNA, 15 bp, Homo sapiens
ctggcatgaattata

SEQ ID NO: 79843 - DNA, 15 bp, Homo sapiens
tggcatgaattatag

SEQ ID NO: 79844 - DNA, 15 bp, Homo sapiens
ggcatgaattataga

SEQ ID NO: 79845 - DNA, 15 bp, Homo sapiens
gcatgaattatagag

SEQ ID NO: 79846 - DNA, 15 bp, Homo sapiens
catgaattatagagc

SEQ ID NO: 79847 - DNA, 15 bp, Homo sapiens
atgaattatagagct

SEQ ID NO: 79848 - DNA, 15 bp, Homo sapiens
tgaattatagagctg

SEQ ID NO: 79849 - DNA, 15 bp, Homo sapiens
gaattatagagctga

SEQ ID NO: 79850 - DNA, 15 bp, Homo sapiens
aattatagagctgag

SEQ ID NO: 79851 - DNA, 15 bp, Homo sapiens
attatagagctgagg

SEQ ID NO: 79852 - DNA, 15 bp, Homo sapiens
ttatagagctgagga

SEQ ID NO: 79853 - DNA, 15 bp, Homo sapiens
tatagagctgaggat

SEQ ID NO: 79854 - DNA, 15 bp, Homo sapiens
atagagctgaggatc

SEQ ID NO: 79855 - DNA, 15 bp, Homo sapiens
tagagctgaggatct

SEQ ID NO: 79856 - DNA, 15 bp, Homo sapiens
agagctgaggatcta

SEQ ID NO: 79857 - DNA, 15 bp, Homo sapiens
gagctgaggatctaa

SEQ ID NO: 79858 - DNA, 15 bp, Homo sapiens
agctgaggatctaaa

SEQ ID NO: 79859 - DNA, 15 bp, Homo sapiens
gctgaggatctaaag

SEQ ID NO: 79860 - DNA, 15 bp, Homo sapiens
ctgaggatctaaaga

SEQ ID NO: 79861 - DNA, 15 bp, Homo sapiens
tgaggatctaaagat

SEQ ID NO: 79862 - DNA, 15 bp, Homo sapiens
gaggatctaaagatt

SEQ ID NO: 79863 - DNA, 15 bp, Homo sapiens
aggatctaaagattt

SEQ ID NO: 79864 - DNA, 15 bp, Homo sapiens
ggatctaaagatttt

SEQ ID NO: 79865 - DNA, 15 bp, Homo sapiens
gatctaaagattttt

SEQ ID NO: 79866 - DNA, 15 bp, Homo sapiens
atctaaagattttta

SEQ ID NO: 79867 - DNA, 15 bp, Homo sapiens
tctaaagatttttac

SEQ ID NO: 79868 - DNA, 15 bp, Homo sapiens
ctaaagatttttact

SEQ ID NO: 79869 - DNA, 15 bp, Homo sapiens
taaagatttttactt

SEQ ID NO: 79870 - DNA, 15 bp, Homo sapiens
aaagatttttacttt

SEQ ID NO: 79871 - DNA, 15 bp, Homo sapiens
aagatttttactttg

SEQ ID NO: 79872 - DNA, 15 bp, Homo sapiens
agatttttactttga

SEQ ID NO: 79873 - DNA, 15 bp, Homo sapiens
gatttttactttgat

SEQ ID NO: 79874 - DNA, 15 bp, Homo sapiens
atttttactttgatt

SEQ ID NO: 79875 - DNA, 15 bp, Homo sapiens
tttttactttgattt

SEQ ID NO: 79876 - DNA, 15 bp, Homo sapiens
ttttactttgattta

SEQ ID NO: 79877 - DNA, 15 bp, Homo sapiens
tttactttgatttat

SEQ ID NO: 79878 - DNA, 15 bp, Homo sapiens
ttactttgatttatc

SEQ ID NO: 79879 - DNA, 15 bp, Homo sapiens
tactttgatttatcc

SEQ ID NO: 79880 - DNA, 15 bp, Homo sapiens
actttgatttatccc

SEQ ID NO: 79881 - DNA, 15 bp, Homo sapiens
ctttgatttatccca

SEQ ID NO: 79882 - DNA, 15 bp, Homo sapiens
tttgatttatcccat

SEQ ID NO: 79883 - DNA, 15 bp, Homo sapiens
ttgatttatcccatt

SEQ ID NO: 79884 - DNA, 15 bp, Homo sapiens
tgatttatcccatta

SEQ ID NO: 79885 - DNA, 15 bp, Homo sapiens
gatttatcccattat

SEQ ID NO: 79886 - DNA, 15 bp, Homo sapiens
atttatcccattatc

SEQ ID NO: 79887 - DNA, 15 bp, Homo sapiens
tttatcccattatca

SEQ ID NO: 79888 - DNA, 15 bp, Homo sapiens
ttatcccattatcat

SEQ ID NO: 79889 - DNA, 15 bp, Homo sapiens
tatcccattatcatc

SEQ ID NO: 79890 - DNA, 15 bp, Homo sapiens
atcccattatcatct

SEQ ID NO: 79891 - DNA, 15 bp, Homo sapiens
tcccattatcatctg

SEQ ID NO: 79892 - DNA, 15 bp, Homo sapiens
cccattatcatctgc

SEQ ID NO: 79893 - DNA, 15 bp, Homo sapiens
ccattatcatctgca

SEQ ID NO: 79894 - DNA, 15 bp, Homo sapiens
cattatcatctgcag

SEQ ID NO: 79895 - DNA, 15 bp, Homo sapiens
attatcatctgcagg

SEQ ID NO: 79896 - DNA, 15 bp, Homo sapiens
ttatcatctgcaggg

SEQ ID NO: 79897 - DNA, 15 bp, Homo sapiens
tatcatctgcaggga

SEQ ID NO: 79898 - DNA, 15 bp, Homo sapiens
atcatctgcagggaa

SEQ ID NO: 79899 - DNA, 15 bp, Homo sapiens
tcatctgcagggaaa

SEQ ID NO: 79900 - DNA, 15 bp, Homo sapiens
catctgcagggaaac

SEQ ID NO: 79901 - DNA, 15 bp, Homo sapiens
atctgcagggaaaca

SEQ ID NO: 79902 - DNA, 15 bp, Homo sapiens
tctgcagggaaacaa

SEQ ID NO: 79903 - DNA, 15 bp, Homo sapiens
ctgcagggaaacaat

SEQ ID NO: 79904 - DNA, 15 bp, Homo sapiens
tgcagggaaacaatt

SEQ ID NO: 79905 - DNA, 15 bp, Homo sapiens
gcagggaaacaattg

SEQ ID NO: 79906 - DNA, 15 bp, Homo sapiens
cagggaaacaattgc

SEQ ID NO: 79907 - DNA, 15 bp, Homo sapiens
agggaaacaattgct

SEQ ID NO: 79908 - DNA, 15 bp, Homo sapiens
gggaaacaattgctt

SEQ ID NO: 79909 - DNA, 15 bp, Homo sapiens
ggaaacaattgcttt

SEQ ID NO: 79910 - DNA, 15 bp, Homo sapiens
gaaacaattgctttt

SEQ ID NO: 79911 - DNA, 15 bp, Homo sapiens
aaacaattgctttta

SEQ ID NO: 79912 - DNA, 15 bp, Homo sapiens
aacaattgcttttac

SEQ ID NO: 79913 - DNA, 15 bp, Homo sapiens
acaattgcttttact

SEQ ID NO: 79914 - DNA, 15 bp, Homo sapiens
caattgcttttactg

SEQ ID NO: 79915 - DNA, 15 bp, Homo sapiens
aattgcttttactga

SEQ ID NO: 79916 - DNA, 15 bp, Homo sapiens
attgcttttactgat

SEQ ID NO: 79917 - DNA, 15 bp, Homo sapiens
ttgcttttactgatt

SEQ ID NO: 79918 - DNA, 15 bp, Homo sapiens
tgcttttactgatta

SEQ ID NO: 79919 - DNA, 15 bp, Homo sapiens
gcttttactgattaa

SEQ ID NO: 79920 - DNA, 15 bp, Homo sapiens
cttttactgattaaa

SEQ ID NO: 79921 - DNA, 15 bp, Homo sapiens
ttttactgattaaaa

SEQ ID NO: 79922 - DNA, 15 bp, Homo sapiens
tttactgattaaaaa

SEQ ID NO: 79923 - DNA, 15 bp, Homo sapiens
ttactgattaaaaat

SEQ ID NO: 79924 - DNA, 15 bp, Homo sapiens
tactgattaaaaatg

SEQ ID NO: 79925 - DNA, 15 bp, Homo sapiens
actgattaaaaatgc

SEQ ID NO: 79926 - DNA, 15 bp, Homo sapiens
ctgattaaaaatgca

SEQ ID NO: 79927 - DNA, 15 bp, Homo sapiens
tgattaaaaatgcag

SEQ ID NO: 79928 - DNA, 15 bp, Homo sapiens
gattaaaaatgcagg

SEQ ID NO: 79929 - DNA, 15 bp, Homo sapiens
attaaaaatgcaggc

SEQ ID NO: 79930 - DNA, 15 bp, Homo sapiens
ttaaaaatgcaggct

SEQ ID NO: 79931 - DNA, 15 bp, Homo sapiens
taaaaatgcaggctg

SEQ ID NO: 79932 - DNA, 15 bp, Homo sapiens
aaaaatgcaggctgg

SEQ ID NO: 79933 - DNA, 15 bp, Homo sapiens
aaaatgcaggctggg

SEQ ID NO: 79934 - DNA, 15 bp, Homo sapiens
aaatgcaggctgggc

SEQ ID NO: 79935 - DNA, 15 bp, Homo sapiens
aatgcaggctgggca

SEQ ID NO: 79936 - DNA, 15 bp, Homo sapiens
atgcaggctgggcac

SEQ ID NO: 79937 - DNA, 15 bp, Homo sapiens
tgcaggctgggcaca

SEQ ID NO: 79938 - DNA, 15 bp, Homo sapiens
gcaggctgggcacag

SEQ ID NO: 79939 - DNA, 15 bp, Homo sapiens
caggctgggcacagc

SEQ ID NO: 79940 - DNA, 15 bp, Homo sapiens
aggctgggcacagcg

SEQ ID NO: 79941 - DNA, 15 bp, Homo sapiens
ggctgggcacagcgg

SEQ ID NO: 79942 - DNA, 15 bp, Homo sapiens
gctgggcacagcggc

SEQ ID NO: 79943 - DNA, 15 bp, Homo sapiens
ctgggcacagcggct

SEQ ID NO: 79944 - DNA, 15 bp, Homo sapiens
tgggcacagcggctc

SEQ ID NO: 79945 - DNA, 15 bp, Homo sapiens
gggcacagcggctca

SEQ ID NO: 79946 - DNA, 15 bp, Homo sapiens
ggcacagcggctcac

SEQ ID NO: 79947 - DNA, 15 bp, Homo sapiens
gcacagcggctcacg

SEQ ID NO: 79948 - DNA, 15 bp, Homo sapiens
cacagcggctcacgc

SEQ ID NO: 79949 - DNA, 15 bp, Homo sapiens
acagcggctcacgcc

SEQ ID NO: 79950 - DNA, 15 bp, Homo sapiens
cagcggctcacgcct

SEQ ID NO: 79951 - DNA, 15 bp, Homo sapiens
agcggctcacgcctg

SEQ ID NO: 79952 - DNA, 15 bp, Homo sapiens
gcggctcacgcctgt

SEQ ID NO: 79953 - DNA, 15 bp, Homo sapiens
cggctcacgcctgta

SEQ ID NO: 79954 - DNA, 15 bp, Homo sapiens
cctgtaatcccagta

SEQ ID NO: 79955 - DNA, 15 bp, Homo sapiens
ctgtaatcccagtac

SEQ ID NO: 79956 - DNA, 15 bp, Homo sapiens
tgtaatcccagtact

SEQ ID NO: 79957 - DNA, 15 bp, Homo sapiens
gtaatcccagtactt

SEQ ID NO: 79958 - DNA, 15 bp, Homo sapiens
taatcccagtacttt

SEQ ID NO: 79959 - DNA, 15 bp, Homo sapiens
aatcccagtactttg

SEQ ID NO: 79960 - DNA, 15 bp, Homo sapiens
atcccagtactttgg

SEQ ID NO: 79961 - DNA, 15 bp, Homo sapiens
tcccagtactttggg

SEQ ID NO: 79962 - DNA, 15 bp, Homo sapiens
cccagtactttggga

SEQ ID NO: 79963 - DNA, 15 bp, Homo sapiens
ccagtactttgggag

SEQ ID NO: 79964 - DNA, 15 bp, Homo sapiens
cagtactttgggagg

SEQ ID NO: 79965 - DNA, 15 bp, Homo sapiens
agtactttgggaggc

SEQ ID NO: 79966 - DNA, 15 bp, Homo sapiens
gtactttgggaggcc

SEQ ID NO: 79967 - DNA, 15 bp, Homo sapiens
tactttgggaggccg

SEQ ID NO: 79968 - DNA, 15 bp, Homo sapiens
tgggaggccgaggcg

SEQ ID NO: 79969 - DNA, 15 bp, Homo sapiens
gggaggccgaggcgg

SEQ ID NO: 79970 - DNA, 15 bp, Homo sapiens
ggaggccgaggcggg

SEQ ID NO: 79971 - DNA, 15 bp, Homo sapiens
gaggccgaggcgggc

SEQ ID NO: 79972 - DNA, 15 bp, Homo sapiens
aggccgaggcgggcg

SEQ ID NO: 79973 - DNA, 15 bp, Homo sapiens
ggccgaggcgggcgg

SEQ ID NO: 79974 - DNA, 15 bp, Homo sapiens
gccgaggcgggcgga

SEQ ID NO: 79975 - DNA, 15 bp, Homo sapiens
ccgaggcgggcggat

SEQ ID NO: 79976 - DNA, 15 bp, Homo sapiens
cgaggcgggcggatc

SEQ ID NO: 79977 - DNA, 15 bp, Homo sapiens
gaggcgggcggatca

SEQ ID NO: 79978 - DNA, 15 bp, Homo sapiens
aggcgggcggatcac

SEQ ID NO: 79979 - DNA, 15 bp, Homo sapiens
ggcgggcggatcaca

SEQ ID NO: 79980 - DNA, 15 bp, Homo sapiens
gcgggcggatcacaa

SEQ ID NO: 79981 - DNA, 15 bp, Homo sapiens
cgggcggatcacaag

SEQ ID NO: 79982 - DNA, 15 bp, Homo sapiens
gggcggatcacaagg

SEQ ID NO: 79983 - DNA, 15 bp, Homo sapiens
ggcggatcacaaggt

SEQ ID NO: 79984 - DNA, 15 bp, Homo sapiens
gcggatcacaaggtc

SEQ ID NO: 79985 - DNA, 15 bp, Homo sapiens
cggatcacaaggtca

SEQ ID NO: 79986 - DNA, 15 bp, Homo sapiens
ggatcacaaggtcaa

SEQ ID NO: 79987 - DNA, 15 bp, Homo sapiens
gatcacaaggtcaag

SEQ ID NO: 79988 - DNA, 15 bp, Homo sapiens
atcacaaggtcaaga

SEQ ID NO: 79989 - DNA, 15 bp, Homo sapiens
tcacaaggtcaagag

SEQ ID NO: 79990 - DNA, 15 bp, Homo sapiens
cacaaggtcaagaga

SEQ ID NO: 79991 - DNA, 15 bp, Homo sapiens
acaaggtcaagagat

SEQ ID NO: 79992 - DNA, 15 bp, Homo sapiens
caaggtcaagagatc

SEQ ID NO: 79993 - DNA, 15 bp, Homo sapiens
aaggtcaagagatcg

SEQ ID NO: 79994 - DNA, 15 bp, Homo sapiens
aggtcaagagatcga

SEQ ID NO: 79995 - DNA, 15 bp, Homo sapiens
ggtcaagagatcgag

SEQ ID NO: 79996 - DNA, 15 bp, Homo sapiens
gtcaagagatcgaga

SEQ ID NO: 79997 - DNA, 15 bp, Homo sapiens
tcaagagatcgagac

SEQ ID NO: 79998 - DNA, 15 bp, Homo sapiens
caagagatcgagacc

SEQ ID NO: 79999 - DNA, 15 bp, Homo sapiens
aagagatcgagacca

SEQ ID NO: 80000 - DNA, 15 bp, Homo sapiens
agagatcgagaccat

SEQ ID NO: 80001 - DNA, 15 bp, Homo sapiens
gagaccatcctggcc

SEQ ID NO: 80002 - DNA, 15 bp, Homo sapiens
agaccatcctggcca

SEQ ID NO: 80003 - DNA, 15 bp, Homo sapiens
gaccatcctggccaa

SEQ ID NO: 80004 - DNA, 15 bp, Homo sapiens
accatcctggccaac

SEQ ID NO: 80005 - DNA, 15 bp, Homo sapiens
ccatcctggccaacc

SEQ ID NO: 80006 - DNA, 15 bp, Homo sapiens
catcctggccaacca

SEQ ID NO: 80007 - DNA, 15 bp, Homo sapiens
atcctggccaaccaa

SEQ ID NO: 80008 - DNA, 15 bp, Homo sapiens
tcctggccaaccaac

SEQ ID NO: 80009 - DNA, 15 bp, Homo sapiens
cctggccaaccaaca

SEQ ID NO: 80010 - DNA, 15 bp, Homo sapiens
ctggccaaccaacat

SEQ ID NO: 80011 - DNA, 15 bp, Homo sapiens
tggccaaccaacatg

SEQ ID NO: 80012 - DNA, 15 bp, Homo sapiens
ggccaaccaacatgg

SEQ ID NO: 80013 - DNA, 15 bp, Homo sapiens
gccaaccaacatggt

SEQ ID NO: 80014 - DNA, 15 bp, Homo sapiens
ccaaccaacatggtg

SEQ ID NO: 80015 - DNA, 15 bp, Homo sapiens
caaccaacatggtga

SEQ ID NO: 80016 - DNA, 15 bp, Homo sapiens
aaccaacatggtgaa

SEQ ID NO: 80017 - DNA, 15 bp, Homo sapiens
aacatggtgaaacct

SEQ ID NO: 80018 - DNA, 15 bp, Homo sapiens
acatggtgaaacctc

SEQ ID NO: 80019 - DNA, 15 bp, Homo sapiens
catggtgaaacctca

SEQ ID NO: 80020 - DNA, 15 bp, Homo sapiens
atggtgaaacctcat

SEQ ID NO: 80021 - DNA, 15 bp, Homo sapiens
tggtgaaacctcatc

SEQ ID NO: 80022 - DNA, 15 bp, Homo sapiens
ggtgaaacctcatct

SEQ ID NO: 80023 - DNA, 15 bp, Homo sapiens
gtgaaacctcatctc

SEQ ID NO: 80024 - DNA, 15 bp, Homo sapiens
tgaaacctcatctct

SEQ ID NO: 80025 - DNA, 15 bp, Homo sapiens
gaaacctcatctcta

SEQ ID NO: 80026 - DNA, 15 bp, Homo sapiens
aaacctcatctctac

SEQ ID NO: 80027 - DNA, 15 bp, Homo sapiens
aacctcatctctact

SEQ ID NO: 80028 - DNA, 15 bp, Homo sapiens
acctcatctctacta

SEQ ID NO: 80029 - DNA, 15 bp, Homo sapiens
cctcatctctactaa

SEQ ID NO: 80030 - DNA, 15 bp, Homo sapiens
ctcatctctactaaa

SEQ ID NO: 80031 - DNA, 15 bp, Homo sapiens
tcatctctactaaaa

SEQ ID NO: 80032 - DNA, 15 bp, Homo sapiens
caaaaattagctggg

SEQ ID NO: 80033 - DNA, 15 bp, Homo sapiens
ctgggtgtggtggcg

SEQ ID NO: 80034 - DNA, 15 bp, Homo sapiens
tgggtgtggtggcgc

SEQ ID NO: 80035 - DNA, 15 bp, Homo sapiens
gggtgtggtggcgcg

SEQ ID NO: 80036 - DNA, 15 bp, Homo sapiens
ggtgtggtggcgcgt

SEQ ID NO: 80037 - DNA, 15 bp, Homo sapiens
gtgtggtggcgcgtg

SEQ ID NO: 80038 - DNA, 15 bp, Homo sapiens
tgtggtggcgcgtgc

SEQ ID NO: 80039 - DNA, 15 bp, Homo sapiens
gtggtggcgcgtgcc

SEQ ID NO: 80040 - DNA, 15 bp, Homo sapiens
tggtggcgcgtgcct

SEQ ID NO: 80041 - DNA, 15 bp, Homo sapiens
ggtggcgcgtgcctg

SEQ ID NO: 80042 - DNA, 15 bp, Homo sapiens
gtggcgcgtgcctgt

SEQ ID NO: 80043 - DNA, 15 bp, Homo sapiens
tggcgcgtgcctgta

SEQ ID NO: 80044 - DNA, 15 bp, Homo sapiens
ggcgcgtgcctgtaa

SEQ ID NO: 80045 - DNA, 15 bp, Homo sapiens
gcgcgtgcctgtaat

SEQ ID NO: 80046 - DNA, 15 bp, Homo sapiens
cgcgtgcctgtaatc

SEQ ID NO: 80047 - DNA, 15 bp, Homo sapiens
gcgtgcctgtaatcc

SEQ ID NO: 80048 - DNA, 15 bp, Homo sapiens
cgtgcctgtaatccc

SEQ ID NO: 80049 - DNA, 15 bp, Homo sapiens
gtgcctgtaatccca

SEQ ID NO: 80050 - DNA, 15 bp, Homo sapiens
ccagctactcaggat

SEQ ID NO: 80051 - DNA, 15 bp, Homo sapiens
cagctactcaggatg

SEQ ID NO: 80052 - DNA, 15 bp, Homo sapiens
agctactcaggatgc

SEQ ID NO: 80053 - DNA, 15 bp, Homo sapiens
gctactcaggatgct

SEQ ID NO: 80054 - DNA, 15 bp, Homo sapiens
ctactcaggatgctg

SEQ ID NO: 80055 - DNA, 15 bp, Homo sapiens
tactcaggatgctga

SEQ ID NO: 80056 - DNA, 15 bp, Homo sapiens
actcaggatgctgag

SEQ ID NO: 80057 - DNA, 15 bp, Homo sapiens
ctcaggatgctgagg

SEQ ID NO: 80058 - DNA, 15 bp, Homo sapiens
tcaggatgctgaggc

SEQ ID NO: 80059 - DNA, 15 bp, Homo sapiens
caggatgctgaggca

SEQ ID NO: 80060 - DNA, 15 bp, Homo sapiens
aggatgctgaggcag

SEQ ID NO: 80061 - DNA, 15 bp, Homo sapiens
ggatgctgaggcagg

SEQ ID NO: 80062 - DNA, 15 bp, Homo sapiens
gatgctgaggcagga

SEQ ID NO: 80063 - DNA, 15 bp, Homo sapiens
atgctgaggcaggag

SEQ ID NO: 80064 - DNA, 15 bp, Homo sapiens
tgctgaggcaggaga

SEQ ID NO: 80065 - DNA, 15 bp, Homo sapiens
gcaggagaatcgctt

SEQ ID NO: 80066 - DNA, 15 bp, Homo sapiens
caggagaatcgcttg

SEQ ID NO: 80067 - DNA, 15 bp, Homo sapiens
aggagaatcgcttga

SEQ ID NO: 80068 - DNA, 15 bp, Homo sapiens
ggagaatcgcttgaa

SEQ ID NO: 80069 - DNA, 15 bp, Homo sapiens
aatcgcttgaacccg

SEQ ID NO: 80070 - DNA, 15 bp, Homo sapiens
atcgcttgaacccgg

SEQ ID NO: 80071 - DNA, 15 bp, Homo sapiens
tcgcttgaacccggg

SEQ ID NO: 80072 - DNA, 15 bp, Homo sapiens
cgcttgaacccggga

SEQ ID NO: 80073 - DNA, 15 bp, Homo sapiens
gcttgaacccgggag

SEQ ID NO: 80074 - DNA, 15 bp, Homo sapiens
cttgaacccgggagg

SEQ ID NO: 80075 - DNA, 15 bp, Homo sapiens
ttgaacccgggaggt

SEQ ID NO: 80076 - DNA, 15 bp, Homo sapiens
tgaacccgggaggtg

SEQ ID NO: 80077 - DNA, 15 bp, Homo sapiens
gaacccgggaggtgg

SEQ ID NO: 80078 - DNA, 15 bp, Homo sapiens
aacccgggaggtgga

SEQ ID NO: 80079 - DNA, 15 bp, Homo sapiens
acccgggaggtggag

SEQ ID NO: 80080 - DNA, 15 bp, Homo sapiens
cccgggaggtggagg

SEQ ID NO: 80081 - DNA, 15 bp, Homo sapiens
ccgggaggtggaggt

SEQ ID NO: 80082 - DNA, 15 bp, Homo sapiens
cgggaggtggaggtt

SEQ ID NO: 80083 - DNA, 15 bp, Homo sapiens
gggaggtggaggttg

SEQ ID NO: 80084 - DNA, 15 bp, Homo sapiens
ggaggtggaggttgc

SEQ ID NO: 80085 - DNA, 15 bp, Homo sapiens
gaggtggaggttgca

SEQ ID NO: 80086 - DNA, 15 bp, Homo sapiens
aggtggaggttgcag

SEQ ID NO: 80087 - DNA, 15 bp, Homo sapiens
ggtggaggttgcagt

SEQ ID NO: 80088 - DNA, 15 bp, Homo sapiens
gtggaggttgcagtg

SEQ ID NO: 80089 - DNA, 15 bp, Homo sapiens
tggaggttgcagtga

SEQ ID NO: 80090 - DNA, 15 bp, Homo sapiens
ggttgcagtgagccg

SEQ ID NO: 80091 - DNA, 15 bp, Homo sapiens
gttgcagtgagccga

SEQ ID NO: 80092 - DNA, 15 bp, Homo sapiens
ttgcagtgagccgag

SEQ ID NO: 80093 - DNA, 15 bp, Homo sapiens
tgcagtgagccgaga

SEQ ID NO: 80094 - DNA, 15 bp, Homo sapiens
gcagtgagccgagac

SEQ ID NO: 80095 - DNA, 15 bp, Homo sapiens
cagtgagccgagact

SEQ ID NO: 80096 - DNA, 15 bp, Homo sapiens
agtgagccgagactg

SEQ ID NO: 80097 - DNA, 15 bp, Homo sapiens
gtgagccgagactgt

SEQ ID NO: 80098 - DNA, 15 bp, Homo sapiens
tgagccgagactgtg

SEQ ID NO: 80099 - DNA, 15 bp, Homo sapiens
gagccgagactgtgc

SEQ ID NO: 80100 - DNA, 15 bp, Homo sapiens
agccgagactgtgcc

SEQ ID NO: 80101 - DNA, 15 bp, Homo sapiens
gccgagactgtgcca

SEQ ID NO: 80102 - DNA, 15 bp, Homo sapiens
ccgagactgtgccac

SEQ ID NO: 80103 - DNA, 15 bp, Homo sapiens
cgagactgtgccact

SEQ ID NO: 80104 - DNA, 15 bp, Homo sapiens
gagactgtgccactg

SEQ ID NO: 80105 - DNA, 15 bp, Homo sapiens
agactgtgccactgc

SEQ ID NO: 80106 - DNA, 15 bp, Homo sapiens
gactgtgccactgca

SEQ ID NO: 80107 - DNA, 15 bp, Homo sapiens
actgtgccactgcac

SEQ ID NO: 80108 - DNA, 15 bp, Homo sapiens
ctgtgccactgcact

SEQ ID NO: 80109 - DNA, 15 bp, Homo sapiens
gtgccactgcactcc

SEQ ID NO: 80110 - DNA, 15 bp, Homo sapiens
gcactccagcctggt

SEQ ID NO: 80111 - DNA, 15 bp, Homo sapiens
cactccagcctggtg

SEQ ID NO: 80112 - DNA, 15 bp, Homo sapiens
actccagcctggtga

SEQ ID NO: 80113 - DNA, 15 bp, Homo sapiens
ctccagcctggtgat

SEQ ID NO: 80114 - DNA, 15 bp, Homo sapiens
tccagcctggtgata

SEQ ID NO: 80115 - DNA, 15 bp, Homo sapiens
ccagcctggtgatag

SEQ ID NO: 80116 - DNA, 15 bp, Homo sapiens
cagcctggtgataga

SEQ ID NO: 80117 - DNA, 15 bp, Homo sapiens
agcctggtgatagag

SEQ ID NO: 80118 - DNA, 15 bp, Homo sapiens
gcctggtgatagagg

SEQ ID NO: 80119 - DNA, 15 bp, Homo sapiens
cctggtgatagaggg

SEQ ID NO: 80120 - DNA, 15 bp, Homo sapiens
ctggtgatagaggga

SEQ ID NO: 80121 - DNA, 15 bp, Homo sapiens
tggtgatagagggag

SEQ ID NO: 80122 - DNA, 15 bp, Homo sapiens
ggtgatagagggaga

SEQ ID NO: 80123 - DNA, 15 bp, Homo sapiens
gtgatagagggagac

SEQ ID NO: 80124 - DNA, 15 bp, Homo sapiens
tgatagagggagact

SEQ ID NO: 80125 - DNA, 15 bp, Homo sapiens
gatagagggagactc

SEQ ID NO: 80126 - DNA, 15 bp, Homo sapiens
atagagggagactcc

SEQ ID NO: 80127 - DNA, 15 bp, Homo sapiens
tagagggagactcca

SEQ ID NO: 80128 - DNA, 15 bp, Homo sapiens
agagggagactccat

SEQ ID NO: 80129 - DNA, 15 bp, Homo sapiens
gagggagactccatc

SEQ ID NO: 80130 - DNA, 15 bp, Homo sapiens
agggagactccatct

SEQ ID NO: 80131 - DNA, 15 bp, Homo sapiens
gggagactccatctc

SEQ ID NO: 80132 - DNA, 15 bp, Homo sapiens
ggagactccatctca

SEQ ID NO: 80133 - DNA, 15 bp, Homo sapiens
gagactccatctcaa

SEQ ID NO: 80134 - DNA, 15 bp, Homo sapiens
agactccatctcaaa

SEQ ID NO: 80135 - DNA, 15 bp, Homo sapiens
gactccatctcaaaa

SEQ ID NO: 80136 - DNA, 15 bp, Homo sapiens
actccatctcaaaaa

SEQ ID NO: 80137 - DNA, 15 bp, Homo sapiens
ctccatctcaaaaaa

SEQ ID NO: 80138 - DNA, 15 bp, Homo sapiens
aaaaaaaaaaaaatg

SEQ ID NO: 80139 - DNA, 15 bp, Homo sapiens
aaaaaaaaaaaatgc

SEQ ID NO: 80140 - DNA, 15 bp, Homo sapiens
aaaaaaaaaaatgca

SEQ ID NO: 80141 - DNA, 15 bp, Homo sapiens
aaaaaaaaaatgcag

SEQ ID NO: 80142 - DNA, 15 bp, Homo sapiens
aaaaaaaaatgcagt

SEQ ID NO: 80143 - DNA, 15 bp, Homo sapiens
aaaaaaaatgcagta

SEQ ID NO: 80144 - DNA, 15 bp, Homo sapiens
aaaaaaatgcagtag

SEQ ID NO: 80145 - DNA, 15 bp, Homo sapiens
aaaaaatgcagtagc

SEQ ID NO: 80146 - DNA, 15 bp, Homo sapiens
aaaaatgcagtagca

SEQ ID NO: 80147 - DNA, 15 bp, Homo sapiens
aaaatgcagtagcaa

SEQ ID NO: 80148 - DNA, 15 bp, Homo sapiens
aaatgcagtagcaaa

SEQ ID NO: 80149 - DNA, 15 bp, Homo sapiens
aatgcagtagcaaaa

SEQ ID NO: 80150 - DNA, 15 bp, Homo sapiens
atgcagtagcaaaag

SEQ ID NO: 80151 - DNA, 15 bp, Homo sapiens
tgcagtagcaaaagc

SEQ ID NO: 80152 - DNA, 15 bp, Homo sapiens
gcagtagcaaaagcg

SEQ ID NO: 80153 - DNA, 15 bp, Homo sapiens
cagtagcaaaagcga

SEQ ID NO: 80154 - DNA, 15 bp, Homo sapiens
agtagcaaaagcgat

SEQ ID NO: 80155 - DNA, 15 bp, Homo sapiens
gtagcaaaagcgatg

SEQ ID NO: 80156 - DNA, 15 bp, Homo sapiens
tagcaaaagcgatgg

SEQ ID NO: 80157 - DNA, 15 bp, Homo sapiens
agcaaaagcgatggt

SEQ ID NO: 80158 - DNA, 15 bp, Homo sapiens
gcaaaagcgatggta

SEQ ID NO: 80159 - DNA, 15 bp, Homo sapiens
caaaagcgatggtag

SEQ ID NO: 80160 - DNA, 15 bp, Homo sapiens
aaaagcgatggtaga

SEQ ID NO: 80161 - DNA, 15 bp, Homo sapiens
aaagcgatggtagaa

SEQ ID NO: 80162 - DNA, 15 bp, Homo sapiens
aagcgatggtagaaa

SEQ ID NO: 80163 - DNA, 15 bp, Homo sapiens
agcgatggtagaaat

SEQ ID NO: 80164 - DNA, 15 bp, Homo sapiens
gcgatggtagaaatt

SEQ ID NO: 80165 - DNA, 15 bp, Homo sapiens
cgatggtagaaattt

SEQ ID NO: 80166 - DNA, 15 bp, Homo sapiens
gatggtagaaattta

SEQ ID NO: 80167 - DNA, 15 bp, Homo sapiens
atggtagaaatttaa

SEQ ID NO: 80168 - DNA, 15 bp, Homo sapiens
tggtagaaatttaaa

SEQ ID NO: 80169 - DNA, 15 bp, Homo sapiens
ggtagaaatttaaaa

SEQ ID NO: 80170 - DNA, 15 bp, Homo sapiens
gtagaaatttaaaac

SEQ ID NO: 80171 - DNA, 15 bp, Homo sapiens
tagaaatttaaaaca

SEQ ID NO: 80172 - DNA, 15 bp, Homo sapiens
agaaatttaaaacag

SEQ ID NO: 80173 - DNA, 15 bp, Homo sapiens
gaaatttaaaacaga

SEQ ID NO: 80174 - DNA, 15 bp, Homo sapiens
aaatttaaaacagag

SEQ ID NO: 80175 - DNA, 15 bp, Homo sapiens
aatttaaaacagagt

SEQ ID NO: 80176 - DNA, 15 bp, Homo sapiens
atttaaaacagagtt

SEQ ID NO: 80177 - DNA, 15 bp, Homo sapiens
tttaaaacagagttg

SEQ ID NO: 80178 - DNA, 15 bp, Homo sapiens
ttaaaacagagttga

SEQ ID NO: 80179 - DNA, 15 bp, Homo sapiens
taaaacagagttgat

SEQ ID NO: 80180 - DNA, 15 bp, Homo sapiens
aaaacagagttgatg

SEQ ID NO: 80181 - DNA, 15 bp, Homo sapiens
aaacagagttgatga

SEQ ID NO: 80182 - DNA, 15 bp, Homo sapiens
aacagagttgatgag

SEQ ID NO: 80183 - DNA, 15 bp, Homo sapiens
acagagttgatgagc

SEQ ID NO: 80184 - DNA, 15 bp, Homo sapiens
cagagttgatgagca

SEQ ID NO: 80185 - DNA, 15 bp, Homo sapiens
agagttgatgagcag

SEQ ID NO: 80186 - DNA, 15 bp, Homo sapiens
gagttgatgagcagc

SEQ ID NO: 80187 - DNA, 15 bp, Homo sapiens
agttgatgagcagca

SEQ ID NO: 80188 - DNA, 15 bp, Homo sapiens
gttgatgagcagcat

SEQ ID NO: 80189 - DNA, 15 bp, Homo sapiens
ttgatgagcagcata

SEQ ID NO: 80190 - DNA, 15 bp, Homo sapiens
tgatgagcagcatat

SEQ ID NO: 80191 - DNA, 15 bp, Homo sapiens
gatgagcagcatata

SEQ ID NO: 80192 - DNA, 15 bp, Homo sapiens
atgagcagcatatat

SEQ ID NO: 80193 - DNA, 15 bp, Homo sapiens
tgagcagcatatatt

SEQ ID NO: 80194 - DNA, 15 bp, Homo sapiens
gagcagcatatattt

SEQ ID NO: 80195 - DNA, 15 bp, Homo sapiens
agcagcatatatttt

SEQ ID NO: 80196 - DNA, 15 bp, Homo sapiens
gcagcatatattttg

SEQ ID NO: 80197 - DNA, 15 bp, Homo sapiens
cagcatatattttgg

SEQ ID NO: 80198 - DNA, 15 bp, Homo sapiens
agcatatattttggt

SEQ ID NO: 80199 - DNA, 15 bp, Homo sapiens
gcatatattttggta

SEQ ID NO: 80200 - DNA, 15 bp, Homo sapiens
catatattttggtag

SEQ ID NO: 80201 - DNA, 15 bp, Homo sapiens
atatattttggtagt

SEQ ID NO: 80202 - DNA, 15 bp, Homo sapiens
tatattttggtagtg

SEQ ID NO: 80203 - DNA, 15 bp, Homo sapiens
atattttggtagtgg

SEQ ID NO: 80204 - DNA, 15 bp, Homo sapiens
tattttggtagtgga

SEQ ID NO: 80205 - DNA, 15 bp, Homo sapiens
attttggtagtggaa

SEQ ID NO: 80206 - DNA, 15 bp, Homo sapiens
ttttggtagtggaaa

SEQ ID NO: 80207 - DNA, 15 bp, Homo sapiens
tttggtagtggaaaa

SEQ ID NO: 80208 - DNA, 15 bp, Homo sapiens
ttggtagtggaaaaa

SEQ ID NO: 80209 - DNA, 15 bp, Homo sapiens
tggtagtggaaaaaa

SEQ ID NO: 80210 - DNA, 15 bp, Homo sapiens
ggtagtggaaaaaaa

SEQ ID NO: 80211 - DNA, 15 bp, Homo sapiens
gtagtggaaaaaaag

SEQ ID NO: 80212 - DNA, 15 bp, Homo sapiens
tagtggaaaaaaagg

SEQ ID NO: 80213 - DNA, 15 bp, Homo sapiens
agtggaaaaaaaggt

SEQ ID NO: 80214 - DNA, 15 bp, Homo sapiens
gtggaaaaaaaggta

SEQ ID NO: 80215 - DNA, 15 bp, Homo sapiens
tggaaaaaaaggtaa

SEQ ID NO: 80216 - DNA, 15 bp, Homo sapiens
ggaaaaaaaggtaaa

SEQ ID NO: 80217 - DNA, 15 bp, Homo sapiens
gaaaaaaaggtaaaa

SEQ ID NO: 80218 - DNA, 15 bp, Homo sapiens
aaaaaaaggtaaaaa

SEQ ID NO: 80219 - DNA, 15 bp, Homo sapiens
aaaaaaggtaaaaaa

SEQ ID NO: 80220 - DNA, 15 bp, Homo sapiens
aaaaaggtaaaaaat

SEQ ID NO: 80221 - DNA, 15 bp, Homo sapiens
aaaaggtaaaaaatt

SEQ ID NO: 80222 - DNA, 15 bp, Homo sapiens
aaaggtaaaaaattt

SEQ ID NO: 80223 - DNA, 15 bp, Homo sapiens
aaggtaaaaaatttt

SEQ ID NO: 80224 - DNA, 15 bp, Homo sapiens
aggtaaaaaattttt

SEQ ID NO: 80225 - DNA, 15 bp, Homo sapiens
ggtaaaaaatttttt

SEQ ID NO: 80226 - DNA, 15 bp, Homo sapiens
gtaaaaaattttttg

SEQ ID NO: 80227 - DNA, 15 bp, Homo sapiens
taaaaaattttttgt

SEQ ID NO: 80228 - DNA, 15 bp, Homo sapiens
aaaaaattttttgta

SEQ ID NO: 80229 - DNA, 15 bp, Homo sapiens
aaaaattttttgtaa

SEQ ID NO: 80230 - DNA, 15 bp, Homo sapiens
aaaattttttgtaat

SEQ ID NO: 80231 - DNA, 15 bp, Homo sapiens
aaattttttgtaata

SEQ ID NO: 80232 - DNA, 15 bp, Homo sapiens
aattttttgtaataa

SEQ ID NO: 80233 - DNA, 15 bp, Homo sapiens
attttttgtaataaa

SEQ ID NO: 80234 - DNA, 15 bp, Homo sapiens
ttttttgtaataaaa

SEQ ID NO: 80235 - DNA, 15 bp, Homo sapiens
tttttgtaataaaat

SEQ ID NO: 80236 - DNA, 15 bp, Homo sapiens
ttttgtaataaaata

SEQ ID NO: 80237 - DNA, 15 bp, Homo sapiens
tttgtaataaaatag

SEQ ID NO: 80238 - DNA, 15 bp, Homo sapiens
ttgtaataaaataga

SEQ ID NO: 80239 - DNA, 15 bp, Homo sapiens
tgtaataaaatagaa

SEQ ID NO: 80240 - DNA, 15 bp, Homo sapiens
gtaataaaatagaaa

SEQ ID NO: 80241 - DNA, 15 bp, Homo sapiens
taataaaatagaaaa

SEQ ID NO: 80242 - DNA, 15 bp, Homo sapiens
aataaaatagaaaaa

SEQ ID NO: 80243 - DNA, 15 bp, Homo sapiens
ataaaatagaaaaat

SEQ ID NO: 80244 - DNA, 15 bp, Homo sapiens
taaaatagaaaaatt

SEQ ID NO: 80245 - DNA, 15 bp, Homo sapiens
aaaatagaaaaattt

SEQ ID NO: 80246 - DNA, 15 bp, Homo sapiens
aaatagaaaaatttt

SEQ ID NO: 80247 - DNA, 15 bp, Homo sapiens
aatagaaaaattttg

SEQ ID NO: 80248 - DNA, 15 bp, Homo sapiens
atagaaaaattttgt

SEQ ID NO: 80249 - DNA, 15 bp, Homo sapiens
tagaaaaattttgta

SEQ ID NO: 80250 - DNA, 15 bp, Homo sapiens
agaaaaattttgtaa

SEQ ID NO: 80251 - DNA, 15 bp, Homo sapiens
gaaaaattttgtaat

SEQ ID NO: 80252 - DNA, 15 bp, Homo sapiens
aaaaattttgtaatg

SEQ ID NO: 80253 - DNA, 15 bp, Homo sapiens
aaaattttgtaatgt

SEQ ID NO: 80254 - DNA, 15 bp, Homo sapiens
aaattttgtaatgtg

SEQ ID NO: 80255 - DNA, 15 bp, Homo sapiens
aattttgtaatgtgg

SEQ ID NO: 80256 - DNA, 15 bp, Homo sapiens
attttgtaatgtgga

SEQ ID NO: 80257 - DNA, 15 bp, Homo sapiens
ttttgtaatgtggag

SEQ ID NO: 80258 - DNA, 15 bp, Homo sapiens
tttgtaatgtggagg

SEQ ID NO: 80259 - DNA, 15 bp, Homo sapiens
ttgtaatgtggaggc

SEQ ID NO: 80260 - DNA, 15 bp, Homo sapiens
tgtaatgtggaggcg

SEQ ID NO: 80261 - DNA, 15 bp, Homo sapiens
gtaatgtggaggcgc

SEQ ID NO: 80262 - DNA, 15 bp, Homo sapiens
taatgtggaggcgca

SEQ ID NO: 80263 - DNA, 15 bp, Homo sapiens
aatgtggaggcgcag

SEQ ID NO: 80264 - DNA, 15 bp, Homo sapiens
atgtggaggcgcaga

SEQ ID NO: 80265 - DNA, 15 bp, Homo sapiens
tgtggaggcgcagaa

SEQ ID NO: 80266 - DNA, 15 bp, Homo sapiens
gtggaggcgcagaac

SEQ ID NO: 80267 - DNA, 15 bp, Homo sapiens
tggaggcgcagaaca

SEQ ID NO: 80268 - DNA, 15 bp, Homo sapiens
ggaggcgcagaacac

SEQ ID NO: 80269 - DNA, 15 bp, Homo sapiens
gaggcgcagaacact

SEQ ID NO: 80270 - DNA, 15 bp, Homo sapiens
aggcgcagaacacta

SEQ ID NO: 80271 - DNA, 15 bp, Homo sapiens
ggcgcagaacactag

SEQ ID NO: 80272 - DNA, 15 bp, Homo sapiens
gcgcagaacactaga

SEQ ID NO: 80273 - DNA, 15 bp, Homo sapiens
cgcagaacactagat

SEQ ID NO: 80274 - DNA, 15 bp, Homo sapiens
gcagaacactagatt

SEQ ID NO: 80275 - DNA, 15 bp, Homo sapiens
cagaacactagattt

SEQ ID NO: 80276 - DNA, 15 bp, Homo sapiens
agaacactagattta

SEQ ID NO: 80277 - DNA, 15 bp, Homo sapiens
gaacactagatttaa

SEQ ID NO: 80278 - DNA, 15 bp, Homo sapiens
aacactagatttaag

SEQ ID NO: 80279 - DNA, 15 bp, Homo sapiens
acactagatttaagc

SEQ ID NO: 80280 - DNA, 15 bp, Homo sapiens
cactagatttaagcc

SEQ ID NO: 80281 - DNA, 15 bp, Homo sapiens
actagatttaagcca

SEQ ID NO: 80282 - DNA, 15 bp, Homo sapiens
ctagatttaagccag

SEQ ID NO: 80283 - DNA, 15 bp, Homo sapiens
tagatttaagccagg

SEQ ID NO: 80284 - DNA, 15 bp, Homo sapiens
agatttaagccaggg

SEQ ID NO: 80285 - DNA, 15 bp, Homo sapiens
gatttaagccagggg

SEQ ID NO: 80286 - DNA, 15 bp, Homo sapiens
atttaagccaggggg

SEQ ID NO: 80287 - DNA, 15 bp, Homo sapiens
tttaagccagggggt

SEQ ID NO: 80288 - DNA, 15 bp, Homo sapiens
ttaagccagggggtc

SEQ ID NO: 80289 - DNA, 15 bp, Homo sapiens
taagccagggggtct

SEQ ID NO: 80290 - DNA, 15 bp, Homo sapiens
aagccagggggtctt

SEQ ID NO: 80291 - DNA, 15 bp, Homo sapiens
agccagggggtctta

SEQ ID NO: 80292 - DNA, 15 bp, Homo sapiens
gccagggggtcttaa

SEQ ID NO: 80293 - DNA, 15 bp, Homo sapiens
ccagggggtcttaaa

SEQ ID NO: 80294 - DNA, 15 bp, Homo sapiens
cagggggtcttaaat

SEQ ID NO: 80295 - DNA, 15 bp, Homo sapiens
agggggtcttaaatt

SEQ ID NO: 80296 - DNA, 15 bp, Homo sapiens
gggggtcttaaattg

SEQ ID NO: 80297 - DNA, 15 bp, Homo sapiens
ggggtcttaaattgt

SEQ ID NO: 80298 - DNA, 15 bp, Homo sapiens
gggtcttaaattgtg

SEQ ID NO: 80299 - DNA, 15 bp, Homo sapiens
ggtcttaaattgtgt

SEQ ID NO: 80300 - DNA, 15 bp, Homo sapiens
gtcttaaattgtgtt

SEQ ID NO: 80301 - DNA, 15 bp, Homo sapiens
tcttaaattgtgtta

SEQ ID NO: 80302 - DNA, 15 bp, Homo sapiens
cttaaattgtgttac

SEQ ID NO: 80303 - DNA, 15 bp, Homo sapiens
ttaaattgtgttaca

SEQ ID NO: 80304 - DNA, 15 bp, Homo sapiens
taaattgtgttacat

SEQ ID NO: 80305 - DNA, 15 bp, Homo sapiens
aaattgtgttacatt

SEQ ID NO: 80306 - DNA, 15 bp, Homo sapiens
aattgtgttacattc

SEQ ID NO: 80307 - DNA, 15 bp, Homo sapiens
attgtgttacattcc

SEQ ID NO: 80308 - DNA, 15 bp, Homo sapiens
ttgtgttacattcct

SEQ ID NO: 80309 - DNA, 15 bp, Homo sapiens
tgtgttacattcctt

SEQ ID NO: 80310 - DNA, 15 bp, Homo sapiens
gtgttacattccttt

SEQ ID NO: 80311 - DNA, 15 bp, Homo sapiens
tgttacattcctttt

SEQ ID NO: 80312 - DNA, 15 bp, Homo sapiens
gttacattcctttta

SEQ ID NO: 80313 - DNA, 15 bp, Homo sapiens
ttacattccttttaa

SEQ ID NO: 80314 - DNA, 15 bp, Homo sapiens
tacattccttttaaa

SEQ ID NO: 80315 - DNA, 15 bp, Homo sapiens
acattccttttaaag

SEQ ID NO: 80316 - DNA, 15 bp, Homo sapiens
cattccttttaaagt

SEQ ID NO: 80317 - DNA, 15 bp, Homo sapiens
attccttttaaagtc

SEQ ID NO: 80318 - DNA, 15 bp, Homo sapiens
ttccttttaaagtct

SEQ ID NO: 80319 - DNA, 15 bp, Homo sapiens
tccttttaaagtctg

SEQ ID NO: 80320 - DNA, 15 bp, Homo sapiens
ccttttaaagtctga

SEQ ID NO: 80321 - DNA, 15 bp, Homo sapiens
cttttaaagtctgat

SEQ ID NO: 80322 - DNA, 15 bp, Homo sapiens
ttttaaagtctgatg

SEQ ID NO: 80323 - DNA, 15 bp, Homo sapiens
tttaaagtctgatgg

SEQ ID NO: 80324 - DNA, 15 bp, Homo sapiens
ttaaagtctgatgga

SEQ ID NO: 80325 - DNA, 15 bp, Homo sapiens
taaagtctgatggaa

SEQ ID NO: 80326 - DNA, 15 bp, Homo sapiens
aaagtctgatggaag

SEQ ID NO: 80327 - DNA, 15 bp, Homo sapiens
aagtctgatggaagg

SEQ ID NO: 80328 - DNA, 15 bp, Homo sapiens
agtctgatggaaggt

SEQ ID NO: 80329 - DNA, 15 bp, Homo sapiens
gtctgatggaaggta

SEQ ID NO: 80330 - DNA, 15 bp, Homo sapiens
tctgatggaaggtat

SEQ ID NO: 80331 - DNA, 15 bp, Homo sapiens
ctgatggaaggtata

SEQ ID NO: 80332 - DNA, 15 bp, Homo sapiens
tgatggaaggtataa

SEQ ID NO: 80333 - DNA, 15 bp, Homo sapiens
gatggaaggtataaa

SEQ ID NO: 80334 - DNA, 15 bp, Homo sapiens
atggaaggtataaat

SEQ ID NO: 80335 - DNA, 15 bp, Homo sapiens
tggaaggtataaatg

SEQ ID NO: 80336 - DNA, 15 bp, Homo sapiens
ggaaggtataaatgt

SEQ ID NO: 80337 - DNA, 15 bp, Homo sapiens
gaaggtataaatgtt

SEQ ID NO: 80338 - DNA, 15 bp, Homo sapiens
aaggtataaatgttc

SEQ ID NO: 80339 - DNA, 15 bp, Homo sapiens
aggtataaatgttct

SEQ ID NO: 80340 - DNA, 15 bp, Homo sapiens
ggtataaatgttctc

SEQ ID NO: 80341 - DNA, 15 bp, Homo sapiens
gtataaatgttctcc

SEQ ID NO: 80342 - DNA, 15 bp, Homo sapiens
tataaatgttctccc

SEQ ID NO: 80343 - DNA, 15 bp, Homo sapiens
ataaatgttctcccc

SEQ ID NO: 80344 - DNA, 15 bp, Homo sapiens
taaatgttctcccct

SEQ ID NO: 80345 - DNA, 15 bp, Homo sapiens
aaatgttctcccctc

SEQ ID NO: 80346 - DNA, 15 bp, Homo sapiens
aatgttctcccctca

SEQ ID NO: 80347 - DNA, 15 bp, Homo sapiens
atgttctcccctcaa

SEQ ID NO: 80348 - DNA, 15 bp, Homo sapiens
tgttctcccctcaaa

SEQ ID NO: 80349 - DNA, 15 bp, Homo sapiens
gttctcccctcaaaa

SEQ ID NO: 80350 - DNA, 15 bp, Homo sapiens
ttctcccctcaaaaa

SEQ ID NO: 80351 - DNA, 15 bp, Homo sapiens
tctcccctcaaaaaa

SEQ ID NO: 80352 - DNA, 15 bp, Homo sapiens
ctcccctcaaaaaat

SEQ ID NO: 80353 - DNA, 15 bp, Homo sapiens
tcccctcaaaaaatg

SEQ ID NO: 80354 - DNA, 15 bp, Homo sapiens
cccctcaaaaaatgt

SEQ ID NO: 80355 - DNA, 15 bp, Homo sapiens
ccctcaaaaaatgtg

SEQ ID NO: 80356 - DNA, 15 bp, Homo sapiens
cctcaaaaaatgtgc

SEQ ID NO: 80357 - DNA, 15 bp, Homo sapiens
ctcaaaaaatgtgca

SEQ ID NO: 80358 - DNA, 15 bp, Homo sapiens
tcaaaaaatgtgcat

SEQ ID NO: 80359 - DNA, 15 bp, Homo sapiens
caaaaaatgtgcata

SEQ ID NO: 80360 - DNA, 15 bp, Homo sapiens
aaaaaatgtgcatag

SEQ ID NO: 80361 - DNA, 15 bp, Homo sapiens
aaaaatgtgcatagt

SEQ ID NO: 80362 - DNA, 15 bp, Homo sapiens
aaaatgtgcatagtg

SEQ ID NO: 80363 - DNA, 15 bp, Homo sapiens
aaatgtgcatagtgt

SEQ ID NO: 80364 - DNA, 15 bp, Homo sapiens
aatgtgcatagtgta

SEQ ID NO: 80365 - DNA, 15 bp, Homo sapiens
atgtgcatagtgtac

SEQ ID NO: 80366 - DNA, 15 bp, Homo sapiens
tgtgcatagtgtaca

SEQ ID NO: 80367 - DNA, 15 bp, Homo sapiens
gtgcatagtgtacat

SEQ ID NO: 80368 - DNA, 15 bp, Homo sapiens
tgcatagtgtacata

SEQ ID NO: 80369 - DNA, 15 bp, Homo sapiens
gcatagtgtacataa

SEQ ID NO: 80370 - DNA, 15 bp, Homo sapiens
catagtgtacataaa

SEQ ID NO: 80371 - DNA, 15 bp, Homo sapiens
atagtgtacataaaa

SEQ ID NO: 80372 - DNA, 15 bp, Homo sapiens
tagtgtacataaaat

SEQ ID NO: 80373 - DNA, 15 bp, Homo sapiens
agtgtacataaaatt

SEQ ID NO: 80374 - DNA, 15 bp, Homo sapiens
gtgtacataaaattt

SEQ ID NO: 80375 - DNA, 15 bp, Homo sapiens
tgtacataaaatttt

SEQ ID NO: 80376 - DNA, 15 bp, Homo sapiens
gtacataaaattttg

SEQ ID NO: 80377 - DNA, 15 bp, Homo sapiens
tacataaaattttgc

SEQ ID NO: 80378 - DNA, 15 bp, Homo sapiens
acataaaattttgca

SEQ ID NO: 80379 - DNA, 15 bp, Homo sapiens
cataaaattttgcag

SEQ ID NO: 80380 - DNA, 15 bp, Homo sapiens
ataaaattttgcagt

SEQ ID NO: 80381 - DNA, 15 bp, Homo sapiens
taaaattttgcagtt

SEQ ID NO: 80382 - DNA, 15 bp, Homo sapiens
aaaattttgcagttt

SEQ ID NO: 80383 - DNA, 15 bp, Homo sapiens
aaattttgcagtttt

SEQ ID NO: 80384 - DNA, 15 bp, Homo sapiens
aattttgcagttttt

SEQ ID NO: 80385 - DNA, 15 bp, Homo sapiens
attttgcagttttta

SEQ ID NO: 80386 - DNA, 15 bp, Homo sapiens
ttttgcagtttttat

SEQ ID NO: 80387 - DNA, 15 bp, Homo sapiens
tttgcagtttttatt

SEQ ID NO: 80388 - DNA, 15 bp, Homo sapiens
ttgcagtttttatta

SEQ ID NO: 80389 - DNA, 15 bp, Homo sapiens
tgcagtttttattac

SEQ ID NO: 80390 - DNA, 15 bp, Homo sapiens
gcagtttttattaca

SEQ ID NO: 80391 - DNA, 15 bp, Homo sapiens
cagtttttattacat

SEQ ID NO: 80392 - DNA, 15 bp, Homo sapiens
agtttttattacatt

SEQ ID NO: 80393 - DNA, 15 bp, Homo sapiens
gtttttattacattg

SEQ ID NO: 80394 - DNA, 15 bp, Homo sapiens
tttttattacattga

SEQ ID NO: 80395 - DNA, 15 bp, Homo sapiens
ttttattacattgaa

SEQ ID NO: 80396 - DNA, 15 bp, Homo sapiens
tttattacattgaaa

SEQ ID NO: 80397 - DNA, 15 bp, Homo sapiens
ttattacattgaaat

SEQ ID NO: 80398 - DNA, 15 bp, Homo sapiens
tattacattgaaata

SEQ ID NO: 80399 - DNA, 15 bp, Homo sapiens
attacattgaaatat

SEQ ID NO: 80400 - DNA, 15 bp, Homo sapiens
ttacattgaaatata

SEQ ID NO: 80401 - DNA, 15 bp, Homo sapiens
tacattgaaatatat

SEQ ID NO: 80402 - DNA, 15 bp, Homo sapiens
acattgaaatatatt

SEQ ID NO: 80403 - DNA, 15 bp, Homo sapiens
cattgaaatatattc

SEQ ID NO: 80404 - DNA, 15 bp, Homo sapiens
attgaaatatattct

SEQ ID NO: 80405 - DNA, 15 bp, Homo sapiens
ttgaaatatattctt

SEQ ID NO: 80406 - DNA, 15 bp, Homo sapiens
tgaaatatattcttt

SEQ ID NO: 80407 - DNA, 15 bp, Homo sapiens
gaaatatattctttt

SEQ ID NO: 80408 - DNA, 15 bp, Homo sapiens
aaatatattctttta

SEQ ID NO: 80409 - DNA, 15 bp, Homo sapiens
aatatattcttttag

SEQ ID NO: 80410 - DNA, 15 bp, Homo sapiens
atatattcttttaga

SEQ ID NO: 80411 - DNA, 15 bp, Homo sapiens
tatattcttttagac

SEQ ID NO: 80412 - DNA, 15 bp, Homo sapiens
atattcttttagaca

SEQ ID NO: 80413 - DNA, 15 bp, Homo sapiens
tattcttttagacag

SEQ ID NO: 80414 - DNA, 15 bp, Homo sapiens
attcttttagacaga

SEQ ID NO: 80415 - DNA, 15 bp, Homo sapiens
ttcttttagacagaa

SEQ ID NO: 80416 - DNA, 15 bp, Homo sapiens
tcttttagacagaat

SEQ ID NO: 80417 - DNA, 15 bp, Homo sapiens
cttttagacagaatg

SEQ ID NO: 80418 - DNA, 15 bp, Homo sapiens
ttttagacagaatgt

SEQ ID NO: 80419 - DNA, 15 bp, Homo sapiens
tttagacagaatgta

SEQ ID NO: 80420 - DNA, 15 bp, Homo sapiens
ttagacagaatgtaa

SEQ ID NO: 80421 - DNA, 15 bp, Homo sapiens
tagacagaatgtaaa

SEQ ID NO: 80422 - DNA, 15 bp, Homo sapiens
agacagaatgtaaaa

SEQ ID NO: 80423 - DNA, 15 bp, Homo sapiens
gacagaatgtaaaag

SEQ ID NO: 80424 - DNA, 15 bp, Homo sapiens
acagaatgtaaaaga

SEQ ID NO: 80425 - DNA, 15 bp, Homo sapiens
cagaatgtaaaagaa

SEQ ID NO: 80426 - DNA, 15 bp, Homo sapiens
agaatgtaaaagaac

SEQ ID NO: 80427 - DNA, 15 bp, Homo sapiens
gaatgtaaaagaacc

SEQ ID NO: 80428 - DNA, 15 bp, Homo sapiens
aatgtaaaagaacct

SEQ ID NO: 80429 - DNA, 15 bp, Homo sapiens
atgtaaaagaacctt

SEQ ID NO: 80430 - DNA, 15 bp, Homo sapiens
tgtaaaagaaccttc

SEQ ID NO: 80431 - DNA, 15 bp, Homo sapiens
gtaaaagaaccttca

SEQ ID NO: 80432 - DNA, 15 bp, Homo sapiens
taaaagaaccttcat

SEQ ID NO: 80433 - DNA, 15 bp, Homo sapiens
aaaagaaccttcatg

SEQ ID NO: 80434 - DNA, 15 bp, Homo sapiens
aaagaaccttcatga

SEQ ID NO: 80435 - DNA, 15 bp, Homo sapiens
aagaaccttcatgaa

SEQ ID NO: 80436 - DNA, 15 bp, Homo sapiens
agaaccttcatgaaa

SEQ ID NO: 80437 - DNA, 15 bp, Homo sapiens
gaaccttcatgaaaa

SEQ ID NO: 80438 - DNA, 15 bp, Homo sapiens
aaccttcatgaaaac

SEQ ID NO: 80439 - DNA, 15 bp, Homo sapiens
accttcatgaaaact

SEQ ID NO: 80440 - DNA, 15 bp, Homo sapiens
ccttcatgaaaacta

SEQ ID NO: 80441 - DNA, 15 bp, Homo sapiens
cttcatgaaaactat

SEQ ID NO: 80442 - DNA, 15 bp, Homo sapiens
ttcatgaaaactatg

SEQ ID NO: 80443 - DNA, 15 bp, Homo sapiens
tcatgaaaactatgt

SEQ ID NO: 80444 - DNA, 15 bp, Homo sapiens
catgaaaactatgtc

SEQ ID NO: 80445 - DNA, 15 bp, Homo sapiens
atgaaaactatgtca

SEQ ID NO: 80446 - DNA, 15 bp, Homo sapiens
tgaaaactatgtcac

SEQ ID NO: 80447 - DNA, 15 bp, Homo sapiens
gaaaactatgtcact

SEQ ID NO: 80448 - DNA, 15 bp, Homo sapiens
aaaactatgtcactt

SEQ ID NO: 80449 - DNA, 15 bp, Homo sapiens
aaactatgtcacttt

SEQ ID NO: 80450 - DNA, 15 bp, Homo sapiens
aactatgtcactttt

SEQ ID NO: 80451 - DNA, 15 bp, Homo sapiens
actatgtcacttttt

SEQ ID NO: 80452 - DNA, 15 bp, Homo sapiens
ctatgtcactttttt

SEQ ID NO: 80453 - DNA, 15 bp, Homo sapiens
tatgtcactttttta

SEQ ID NO: 80454 - DNA, 15 bp, Homo sapiens
atgtcacttttttat

SEQ ID NO: 80455 - DNA, 15 bp, Homo sapiens
tgtcacttttttatg

SEQ ID NO: 80456 - DNA, 15 bp, Homo sapiens
gtcacttttttatgc

SEQ ID NO: 80457 - DNA, 15 bp, Homo sapiens
tcacttttttatgca

SEQ ID NO: 80458 - DNA, 15 bp, Homo sapiens
cacttttttatgcaa

SEQ ID NO: 80459 - DNA, 15 bp, Homo sapiens
acttttttatgcaaa

SEQ ID NO: 80460 - DNA, 15 bp, Homo sapiens
cttttttatgcaaaa

SEQ ID NO: 80461 - DNA, 15 bp, Homo sapiens
ttttttatgcaaaaa

SEQ ID NO: 80462 - DNA, 15 bp, Homo sapiens
tttttatgcaaaaac

SEQ ID NO: 80463 - DNA, 15 bp, Homo sapiens
ttttatgcaaaaacc

SEQ ID NO: 80464 - DNA, 15 bp, Homo sapiens
tttatgcaaaaacca

SEQ ID NO: 80465 - DNA, 15 bp, Homo sapiens
ttatgcaaaaaccag

SEQ ID NO: 80466 - DNA, 15 bp, Homo sapiens
tatgcaaaaaccagt

SEQ ID NO: 80467 - DNA, 15 bp, Homo sapiens
atgcaaaaaccagtg

SEQ ID NO: 80468 - DNA, 15 bp, Homo sapiens
tgcaaaaaccagtgg

SEQ ID NO: 80469 - DNA, 15 bp, Homo sapiens
gcaaaaaccagtggc

SEQ ID NO: 80470 - DNA, 15 bp, Homo sapiens
caaaaaccagtggct

SEQ ID NO: 80471 - DNA, 15 bp, Homo sapiens
aaaaaccagtggcta

SEQ ID NO: 80472 - DNA, 15 bp, Homo sapiens
aaaaccagtggctac

SEQ ID NO: 80473 - DNA, 15 bp, Homo sapiens
aaaccagtggctact

SEQ ID NO: 80474 - DNA, 15 bp, Homo sapiens
aaccagtggctacta

SEQ ID NO: 80475 - DNA, 15 bp, Homo sapiens
accagtggctactac

SEQ ID NO: 80476 - DNA, 15 bp, Homo sapiens
ccagtggctactaca

SEQ ID NO: 80477 - DNA, 15 bp, Homo sapiens
cagtggctactacat

SEQ ID NO: 80478 - DNA, 15 bp, Homo sapiens
agtggctactacatg

SEQ ID NO: 80479 - DNA, 15 bp, Homo sapiens
gtggctactacatga

SEQ ID NO: 80480 - DNA, 15 bp, Homo sapiens
tggctactacatgag

SEQ ID NO: 80481 - DNA, 15 bp, Homo sapiens
ggctactacatgaga

SEQ ID NO: 80482 - DNA, 15 bp, Homo sapiens
gctactacatgagag

SEQ ID NO: 80483 - DNA, 15 bp, Homo sapiens
ctactacatgagagc

SEQ ID NO: 80484 - DNA, 15 bp, Homo sapiens
tactacatgagagca

SEQ ID NO: 80485 - DNA, 15 bp, Homo sapiens
actacatgagagcaa

SEQ ID NO: 80486 - DNA, 15 bp, Homo sapiens
ctacatgagagcaat

SEQ ID NO: 80487 - DNA, 15 bp, Homo sapiens
tacatgagagcaatg

SEQ ID NO: 80488 - DNA, 15 bp, Homo sapiens
acatgagagcaatga

SEQ ID NO: 80489 - DNA, 15 bp, Homo sapiens
catgagagcaatgaa

SEQ ID NO: 80490 - DNA, 15 bp, Homo sapiens
atgagagcaatgaat

SEQ ID NO: 80491 - DNA, 15 bp, Homo sapiens
tgagagcaatgaata

SEQ ID NO: 80492 - DNA, 15 bp, Homo sapiens
gagagcaatgaataa

SEQ ID NO: 80493 - DNA, 15 bp, Homo sapiens
agagcaatgaataaa

SEQ ID NO: 80494 - DNA, 15 bp, Homo sapiens
gagcaatgaataaat

SEQ ID NO: 80495 - DNA, 15 bp, Homo sapiens
agcaatgaataaatc

SEQ ID NO: 80496 - DNA, 15 bp, Homo sapiens
gcaatgaataaatct

SEQ ID NO: 80497 - DNA, 15 bp, Homo sapiens
caatgaataaatcta

SEQ ID NO: 80498 - DNA, 15 bp, Homo sapiens
aatgaataaatctaa

SEQ ID NO: 80499 - DNA, 15 bp, Homo sapiens
atgaataaatctaag

SEQ ID NO: 80500 - DNA, 15 bp, Homo sapiens
tgaataaatctaagt

SEQ ID NO: 80501 - DNA, 15 bp, Homo sapiens
gaataaatctaagtg

SEQ ID NO: 80502 - DNA, 15 bp, Homo sapiens
aataaatctaagtgg

SEQ ID NO: 80503 - DNA, 15 bp, Homo sapiens
ataaatctaagtggt

SEQ ID NO: 80504 - DNA, 15 bp, Homo sapiens
taaatctaagtggta

SEQ ID NO: 80505 - DNA, 15 bp, Homo sapiens
aaatctaagtggtac

SEQ ID NO: 80506 - DNA, 15 bp, Homo sapiens
aatctaagtggtaca

SEQ ID NO: 80507 - DNA, 15 bp, Homo sapiens
atctaagtggtacaa

SEQ ID NO: 80508 - DNA, 15 bp, Homo sapiens
tctaagtggtacaaa

SEQ ID NO: 80509 - DNA, 15 bp, Homo sapiens
ctaagtggtacaaat

SEQ ID NO: 80510 - DNA, 15 bp, Homo sapiens
taagtggtacaaatt

SEQ ID NO: 80511 - DNA, 15 bp, Homo sapiens
aagtggtacaaatta

SEQ ID NO: 80512 - DNA, 15 bp, Homo sapiens
agtggtacaaattaa

SEQ ID NO: 80513 - DNA, 15 bp, Homo sapiens
gtggtacaaattaac

SEQ ID NO: 80514 - DNA, 15 bp, Homo sapiens
tggtacaaattaacc

SEQ ID NO: 80515 - DNA, 15 bp, Homo sapiens
ggtacaaattaacca

SEQ ID NO: 80516 - DNA, 15 bp, Homo sapiens
gtacaaattaaccaa

SEQ ID NO: 80517 - DNA, 15 bp, Homo sapiens
tacaaattaaccaaa

SEQ ID NO: 80518 - DNA, 15 bp, Homo sapiens
acaaattaaccaaaa

SEQ ID NO: 80519 - DNA, 15 bp, Homo sapiens
caaattaaccaaaat

SEQ ID NO: 80520 - DNA, 15 bp, Homo sapiens
aaattaaccaaaatt

SEQ ID NO: 80521 - DNA, 15 bp, Homo sapiens
aattaaccaaaatta

SEQ ID NO: 80522 - DNA, 15 bp, Homo sapiens
attaaccaaaattaa

SEQ ID NO: 80523 - DNA, 15 bp, Homo sapiens
ttaaccaaaattaag

SEQ ID NO: 80524 - DNA, 15 bp, Homo sapiens
taaccaaaattaagc

SEQ ID NO: 80525 - DNA, 15 bp, Homo sapiens
aaccaaaattaagct

SEQ ID NO: 80526 - DNA, 15 bp, Homo sapiens
accaaaattaagctt

SEQ ID NO: 80527 - DNA, 15 bp, Homo sapiens
ccaaaattaagcttt

SEQ ID NO: 80528 - DNA, 15 bp, Homo sapiens
caaaattaagcttta

SEQ ID NO: 80529 - DNA, 15 bp, Homo sapiens
aaaattaagctttag

SEQ ID NO: 80530 - DNA, 15 bp, Homo sapiens
aaattaagctttagt

SEQ ID NO: 80531 - DNA, 15 bp, Homo sapiens
aattaagctttagtt

SEQ ID NO: 80532 - DNA, 15 bp, Homo sapiens
attaagctttagttc

SEQ ID NO: 80533 - DNA, 15 bp, Homo sapiens
ttaagctttagttct

SEQ ID NO: 80534 - DNA, 15 bp, Homo sapiens
taagctttagttctg

SEQ ID NO: 80535 - DNA, 15 bp, Homo sapiens
aagctttagttctgt

SEQ ID NO: 80536 - DNA, 15 bp, Homo sapiens
agctttagttctgtt

SEQ ID NO: 80537 - DNA, 15 bp, Homo sapiens
gctttagttctgttc

SEQ ID NO: 80538 - DNA, 15 bp, Homo sapiens
ctttagttctgttca

SEQ ID NO: 80539 - DNA, 15 bp, Homo sapiens
tttagttctgttcaa

SEQ ID NO: 80540 - DNA, 15 bp, Homo sapiens
ttagttctgttcaat

SEQ ID NO: 80541 - DNA, 15 bp, Homo sapiens
tagttctgttcaata

SEQ ID NO: 80542 - DNA, 15 bp, Homo sapiens
agttctgttcaatac

SEQ ID NO: 80543 - DNA, 15 bp, Homo sapiens
gttctgttcaatact

SEQ ID NO: 80544 - DNA, 15 bp, Homo sapiens
ttctgttcaatacta

SEQ ID NO: 80545 - DNA, 15 bp, Homo sapiens
tctgttcaatactaa

SEQ ID NO: 80546 - DNA, 15 bp, Homo sapiens
ctgttcaatactaaa

SEQ ID NO: 80547 - DNA, 15 bp, Homo sapiens
tgttcaatactaaat

SEQ ID NO: 80548 - DNA, 15 bp, Homo sapiens
gttcaatactaaatt

SEQ ID NO: 80549 - DNA, 15 bp, Homo sapiens
ttcaatactaaattt

SEQ ID NO: 80550 - DNA, 15 bp, Homo sapiens
tcaatactaaatttt

SEQ ID NO: 80551 - DNA, 15 bp, Homo sapiens
caatactaaatttta

SEQ ID NO: 80552 - DNA, 15 bp, Homo sapiens
aatactaaattttaa

SEQ ID NO: 80553 - DNA, 15 bp, Homo sapiens
atactaaattttaat

SEQ ID NO: 80554 - DNA, 15 bp, Homo sapiens
tactaaattttaatg

SEQ ID NO: 80555 - DNA, 15 bp, Homo sapiens
actaaattttaatga

SEQ ID NO: 80556 - DNA, 15 bp, Homo sapiens
ctaaattttaatgaa

SEQ ID NO: 80557 - DNA, 15 bp, Homo sapiens
taaattttaatgaaa

SEQ ID NO: 80558 - DNA, 15 bp, Homo sapiens
aaattttaatgaaaa

SEQ ID NO: 80559 - DNA, 15 bp, Homo sapiens
aattttaatgaaaag

SEQ ID NO: 80560 - DNA, 15 bp, Homo sapiens
attttaatgaaaaga

SEQ ID NO: 80561 - DNA, 15 bp, Homo sapiens
ttttaatgaaaagac

SEQ ID NO: 80562 - DNA, 15 bp, Homo sapiens
tttaatgaaaagact

SEQ ID NO: 80563 - DNA, 15 bp, Homo sapiens
ttaatgaaaagactg

SEQ ID NO: 80564 - DNA, 15 bp, Homo sapiens
taatgaaaagactgc

SEQ ID NO: 80565 - DNA, 15 bp, Homo sapiens
aatgaaaagactgct

SEQ ID NO: 80566 - DNA, 15 bp, Homo sapiens
atgaaaagactgcta

SEQ ID NO: 80567 - DNA, 15 bp, Homo sapiens
tgaaaagactgctat

SEQ ID NO: 80568 - DNA, 15 bp, Homo sapiens
gaaaagactgctatt

SEQ ID NO: 80569 - DNA, 15 bp, Homo sapiens
aaaagactgctattt

SEQ ID NO: 80570 - DNA, 15 bp, Homo sapiens
aaagactgctattta

SEQ ID NO: 80571 - DNA, 15 bp, Homo sapiens
aagactgctatttaa

SEQ ID NO: 80572 - DNA, 15 bp, Homo sapiens
agactgctatttaac

SEQ ID NO: 80573 - DNA, 15 bp, Homo sapiens
gactgctatttaact

SEQ ID NO: 80574 - DNA, 15 bp, Homo sapiens
actgctatttaactt

SEQ ID NO: 80575 - DNA, 15 bp, Homo sapiens
ctgctatttaacttt

SEQ ID NO: 80576 - DNA, 15 bp, Homo sapiens
tgctatttaactttt

SEQ ID NO: 80577 - DNA, 15 bp, Homo sapiens
gctatttaactttta

SEQ ID NO: 80578 - DNA, 15 bp, Homo sapiens
ctatttaacttttaa

SEQ ID NO: 80579 - DNA, 15 bp, Homo sapiens
tatttaacttttaaa

SEQ ID NO: 80580 - DNA, 15 bp, Homo sapiens
atttaacttttaaaa

SEQ ID NO: 80581 - DNA, 15 bp, Homo sapiens
tttaacttttaaaat

SEQ ID NO: 80582 - DNA, 15 bp, Homo sapiens
ttaacttttaaaata

SEQ ID NO: 80583 - DNA, 15 bp, Homo sapiens
taacttttaaaataa

SEQ ID NO: 80584 - DNA, 15 bp, Homo sapiens
aacttttaaaataac

SEQ ID NO: 80585 - DNA, 15 bp, Homo sapiens
acttttaaaataaca

SEQ ID NO: 80586 - DNA, 15 bp, Homo sapiens
cttttaaaataacaa

SEQ ID NO: 80587 - DNA, 15 bp, Homo sapiens
ttttaaaataacaag

SEQ ID NO: 80588 - DNA, 15 bp, Homo sapiens
tttaaaataacaagt

SEQ ID NO: 80589 - DNA, 15 bp, Homo sapiens
ttaaaataacaagtt

SEQ ID NO: 80590 - DNA, 15 bp, Homo sapiens
taaaataacaagttg

SEQ ID NO: 80591 - DNA, 15 bp, Homo sapiens
aaaataacaagttga

SEQ ID NO: 80592 - DNA, 15 bp, Homo sapiens
aaataacaagttgaa

SEQ ID NO: 80593 - DNA, 15 bp, Homo sapiens
aataacaagttgaaa

SEQ ID NO: 80594 - DNA, 15 bp, Homo sapiens
ataacaagttgaaac

SEQ ID NO: 80595 - DNA, 15 bp, Homo sapiens
taacaagttgaaact

SEQ ID NO: 80596 - DNA, 15 bp, Homo sapiens
aacaagttgaaacta

SEQ ID NO: 80597 - DNA, 15 bp, Homo sapiens
acaagttgaaactat

SEQ ID NO: 80598 - DNA, 15 bp, Homo sapiens
caagttgaaactatg

SEQ ID NO: 80599 - DNA, 15 bp, Homo sapiens
aagttgaaactatgc

SEQ ID NO: 80600 - DNA, 15 bp, Homo sapiens
agttgaaactatgct

SEQ ID NO: 80601 - DNA, 15 bp, Homo sapiens
gttgaaactatgctc

SEQ ID NO: 80602 - DNA, 15 bp, Homo sapiens
ttgaaactatgctct

SEQ ID NO: 80603 - DNA, 15 bp, Homo sapiens
tgaaactatgctctt

SEQ ID NO: 80604 - DNA, 15 bp, Homo sapiens
gaaactatgctcttt

SEQ ID NO: 80605 - DNA, 15 bp, Homo sapiens
aaactatgctctttg

SEQ ID NO: 80606 - DNA, 15 bp, Homo sapiens
aactatgctctttga

SEQ ID NO: 80607 - DNA, 15 bp, Homo sapiens
actatgctctttgac

SEQ ID NO: 80608 - DNA, 15 bp, Homo sapiens
ctatgctctttgact

SEQ ID NO: 80609 - DNA, 15 bp, Homo sapiens
tatgctctttgactt

SEQ ID NO: 80610 - DNA, 15 bp, Homo sapiens
atgctctttgacttt

SEQ ID NO: 80611 - DNA, 15 bp, Homo sapiens
tgctctttgactttg

SEQ ID NO: 80612 - DNA, 15 bp, Homo sapiens
gctctttgactttga

SEQ ID NO: 80613 - DNA, 15 bp, Homo sapiens
ctctttgactttgac

SEQ ID NO: 80614 - DNA, 15 bp, Homo sapiens
tctttgactttgact

SEQ ID NO: 80615 - DNA, 15 bp, Homo sapiens
ctttgactttgactt

SEQ ID NO: 80616 - DNA, 15 bp, Homo sapiens
tttgactttgacttt

SEQ ID NO: 80617 - DNA, 15 bp, Homo sapiens
ttgactttgactttg

SEQ ID NO: 80618 - DNA, 15 bp, Homo sapiens
tgactttgactttgc

SEQ ID NO: 80619 - DNA, 15 bp, Homo sapiens
gactttgactttgca

SEQ ID NO: 80620 - DNA, 15 bp, Homo sapiens
actttgactttgcaa

SEQ ID NO: 80621 - DNA, 15 bp, Homo sapiens
ctttgactttgcaac

SEQ ID NO: 80622 - DNA, 15 bp, Homo sapiens
tttgactttgcaact

SEQ ID NO: 80623 - DNA, 15 bp, Homo sapiens
ttgactttgcaactt

SEQ ID NO: 80624 - DNA, 15 bp, Homo sapiens
tgactttgcaacttt

SEQ ID NO: 80625 - DNA, 15 bp, Homo sapiens
gactttgcaactttt

SEQ ID NO: 80626 - DNA, 15 bp, Homo sapiens
actttgcaactttta

SEQ ID NO: 80627 - DNA, 15 bp, Homo sapiens
ctttgcaacttttat

SEQ ID NO: 80628 - DNA, 15 bp, Homo sapiens
tttgcaacttttata

SEQ ID NO: 80629 - DNA, 15 bp, Homo sapiens
ttgcaacttttatat

SEQ ID NO: 80630 - DNA, 15 bp, Homo sapiens
tgcaacttttatatg

SEQ ID NO: 80631 - DNA, 15 bp, Homo sapiens
gcaacttttatatga

SEQ ID NO: 80632 - DNA, 15 bp, Homo sapiens
caacttttatatgat

SEQ ID NO: 80633 - DNA, 15 bp, Homo sapiens
aacttttatatgatc

SEQ ID NO: 80634 - DNA, 15 bp, Homo sapiens
acttttatatgatct

SEQ ID NO: 80635 - DNA, 15 bp, Homo sapiens
cttttatatgatctt

SEQ ID NO: 80636 - DNA, 15 bp, Homo sapiens
ttttatatgatcttt

SEQ ID NO: 80637 - DNA, 15 bp, Homo sapiens
tttatatgatctttg

SEQ ID NO: 80638 - DNA, 15 bp, Homo sapiens
ttatatgatctttga

SEQ ID NO: 80639 - DNA, 15 bp, Homo sapiens
tatatgatctttgat

SEQ ID NO: 80640 - DNA, 15 bp, Homo sapiens
atatgatctttgata

SEQ ID NO: 80641 - DNA, 15 bp, Homo sapiens
tatgatctttgatat

SEQ ID NO: 80642 - DNA, 15 bp, Homo sapiens
atgatctttgatatc

SEQ ID NO: 80643 - DNA, 15 bp, Homo sapiens
tgatctttgatatcc

SEQ ID NO: 80644 - DNA, 15 bp, Homo sapiens
gatctttgatatcca

SEQ ID NO: 80645 - DNA, 15 bp, Homo sapiens
atctttgatatccaa

SEQ ID NO: 80646 - DNA, 15 bp, Homo sapiens
tctttgatatccaat

SEQ ID NO: 80647 - DNA, 15 bp, Homo sapiens
ctttgatatccaatc

SEQ ID NO: 80648 - DNA, 15 bp, Homo sapiens
tttgatatccaatca

SEQ ID NO: 80649 - DNA, 15 bp, Homo sapiens
ttgatatccaatcag

SEQ ID NO: 80650 - DNA, 15 bp, Homo sapiens
tgatatccaatcagt

SEQ ID NO: 80651 - DNA, 15 bp, Homo sapiens
gatatccaatcagtg

SEQ ID NO: 80652 - DNA, 15 bp, Homo sapiens
atatccaatcagtgt

SEQ ID NO: 80653 - DNA, 15 bp, Homo sapiens
tatccaatcagtgtt

SEQ ID NO: 80654 - DNA, 15 bp, Homo sapiens
atccaatcagtgttg

SEQ ID NO: 80655 - DNA, 15 bp, Homo sapiens
tccaatcagtgttga

SEQ ID NO: 80656 - DNA, 15 bp, Homo sapiens
ccaatcagtgttgac

SEQ ID NO: 80657 - DNA, 15 bp, Homo sapiens
caatcagtgttgact

SEQ ID NO: 80658 - DNA, 15 bp, Homo sapiens
aatcagtgttgactt

SEQ ID NO: 80659 - DNA, 15 bp, Homo sapiens
atcagtgttgacttt

SEQ ID NO: 80660 - DNA, 15 bp, Homo sapiens
tcagtgttgactttg

SEQ ID NO: 80661 - DNA, 15 bp, Homo sapiens
cagtgttgactttgg

SEQ ID NO: 80662 - DNA, 15 bp, Homo sapiens
agtgttgactttggt

SEQ ID NO: 80663 - DNA, 15 bp, Homo sapiens
gtgttgactttggta

SEQ ID NO: 80664 - DNA, 15 bp, Homo sapiens
tgttgactttggtaa

SEQ ID NO: 80665 - DNA, 15 bp, Homo sapiens
gttgactttggtaaa

SEQ ID NO: 80666 - DNA, 15 bp, Homo sapiens
ttgactttggtaaaa

SEQ ID NO: 80667 - DNA, 15 bp, Homo sapiens
tgactttggtaaaaa

SEQ ID NO: 80668 - DNA, 15 bp, Homo sapiens
gactttggtaaaaag

SEQ ID NO: 80669 - DNA, 15 bp, Homo sapiens
actttggtaaaaagt

SEQ ID NO: 80670 - DNA, 15 bp, Homo sapiens
ctttggtaaaaagtg

SEQ ID NO: 80671 - DNA, 15 bp, Homo sapiens
tttggtaaaaagtgc

SEQ ID NO: 80672 - DNA, 15 bp, Homo sapiens
ttggtaaaaagtgct

SEQ ID NO: 80673 - DNA, 15 bp, Homo sapiens
tggtaaaaagtgctg

SEQ ID NO: 80674 - DNA, 15 bp, Homo sapiens
ggtaaaaagtgctga

SEQ ID NO: 80675 - DNA, 15 bp, Homo sapiens
gtaaaaagtgctgaa

SEQ ID NO: 80676 - DNA, 15 bp, Homo sapiens
taaaaagtgctgaaa

SEQ ID NO: 80677 - DNA, 15 bp, Homo sapiens
aaaaagtgctgaaaa

SEQ ID NO: 80678 - DNA, 15 bp, Homo sapiens
aaaagtgctgaaaat

SEQ ID NO: 80679 - DNA, 15 bp, Homo sapiens
aaagtgctgaaaatg

SEQ ID NO: 80680 - DNA, 15 bp, Homo sapiens
aagtgctgaaaatgc

SEQ ID NO: 80681 - DNA, 15 bp, Homo sapiens
agtgctgaaaatgct

SEQ ID NO: 80682 - DNA, 15 bp, Homo sapiens
gtgctgaaaatgcta

SEQ ID NO: 80683 - DNA, 15 bp, Homo sapiens
tgctgaaaatgctat

SEQ ID NO: 80684 - DNA, 15 bp, Homo sapiens
gctgaaaatgctatt

SEQ ID NO: 80685 - DNA, 15 bp, Homo sapiens
ctgaaaatgctattt

SEQ ID NO: 80686 - DNA, 15 bp, Homo sapiens
tgaaaatgctatttt

SEQ ID NO: 80687 - DNA, 15 bp, Homo sapiens
gaaaatgctatttta

SEQ ID NO: 80688 - DNA, 15 bp, Homo sapiens
aaaatgctattttac

SEQ ID NO: 80689 - DNA, 15 bp, Homo sapiens
aaatgctattttaca

SEQ ID NO: 80690 - DNA, 15 bp, Homo sapiens
aatgctattttacaa

SEQ ID NO: 80691 - DNA, 15 bp, Homo sapiens
atgctattttacaaa

SEQ ID NO: 80692 - DNA, 15 bp, Homo sapiens
tgctattttacaaaa

SEQ ID NO: 80693 - DNA, 15 bp, Homo sapiens
gctattttacaaaag

SEQ ID NO: 80694 - DNA, 15 bp, Homo sapiens
ctattttacaaaaga

SEQ ID NO: 80695 - DNA, 15 bp, Homo sapiens
tattttacaaaagaa

SEQ ID NO: 80696 - DNA, 15 bp, Homo sapiens
attttacaaaagaaa

SEQ ID NO: 80697 - DNA, 15 bp, Homo sapiens
ttttacaaaagaaag

SEQ ID NO: 80698 - DNA, 15 bp, Homo sapiens
tttacaaaagaaaga

SEQ ID NO: 80699 - DNA, 15 bp, Homo sapiens
ttacaaaagaaagaa

SEQ ID NO: 80700 - DNA, 15 bp, Homo sapiens
tacaaaagaaagaag

SEQ ID NO: 80701 - DNA, 15 bp, Homo sapiens
acaaaagaaagaaga

SEQ ID NO: 80702 - DNA, 15 bp, Homo sapiens
caaaagaaagaagag

SEQ ID NO: 80703 - DNA, 15 bp, Homo sapiens
aaaagaaagaagagt

SEQ ID NO: 80704 - DNA, 15 bp, Homo sapiens
aaagaaagaagagta

SEQ ID NO: 80705 - DNA, 15 bp, Homo sapiens
aagaaagaagagtaa

SEQ ID NO: 80706 - DNA, 15 bp, Homo sapiens
agaaagaagagtaaa

SEQ ID NO: 80707 - DNA, 15 bp, Homo sapiens
gaaagaagagtaaat

SEQ ID NO: 80708 - DNA, 15 bp, Homo sapiens
aaagaagagtaaatg

SEQ ID NO: 80709 - DNA, 15 bp, Homo sapiens
aagaagagtaaatgg

SEQ ID NO: 80710 - DNA, 15 bp, Homo sapiens
agaagagtaaatgga

SEQ ID NO: 80711 - DNA, 15 bp, Homo sapiens
gaagagtaaatggaa

SEQ ID NO: 80712 - DNA, 15 bp, Homo sapiens
aagagtaaatggaat

SEQ ID NO: 80713 - DNA, 15 bp, Homo sapiens
agagtaaatggaatc

SEQ ID NO: 80714 - DNA, 15 bp, Homo sapiens
gagtaaatggaatct

SEQ ID NO: 80715 - DNA, 15 bp, Homo sapiens
agtaaatggaatctg

SEQ ID NO: 80716 - DNA, 15 bp, Homo sapiens
gtaaatggaatctgt

SEQ ID NO: 80717 - DNA, 15 bp, Homo sapiens
taaatggaatctgta

SEQ ID NO: 80718 - DNA, 15 bp, Homo sapiens
aaatggaatctgtag

SEQ ID NO: 80719 - DNA, 15 bp, Homo sapiens
aatggaatctgtaga

SEQ ID NO: 80720 - DNA, 15 bp, Homo sapiens
atggaatctgtagat

SEQ ID NO: 80721 - DNA, 15 bp, Homo sapiens
tggaatctgtagatt

SEQ ID NO: 80722 - DNA, 15 bp, Homo sapiens
ggaatctgtagattc

SEQ ID NO: 80723 - DNA, 15 bp, Homo sapiens
gaatctgtagattct

SEQ ID NO: 80724 - DNA, 15 bp, Homo sapiens
aatctgtagattcta

SEQ ID NO: 80725 - DNA, 15 bp, Homo sapiens
atctgtagattctat

SEQ ID NO: 80726 - DNA, 15 bp, Homo sapiens
tctgtagattctatt

SEQ ID NO: 80727 - DNA, 15 bp, Homo sapiens
ctgtagattctattg

SEQ ID NO: 80728 - DNA, 15 bp, Homo sapiens
tgtagattctattgc

SEQ ID NO: 80729 - DNA, 15 bp, Homo sapiens
gtagattctattgcc

SEQ ID NO: 80730 - DNA, 15 bp, Homo sapiens
tagattctattgcct

SEQ ID NO: 80731 - DNA, 15 bp, Homo sapiens
agattctattgcctg

SEQ ID NO: 80732 - DNA, 15 bp, Homo sapiens
gattctattgcctga

SEQ ID NO: 80733 - DNA, 15 bp, Homo sapiens
attctattgcctgat

SEQ ID NO: 80734 - DNA, 15 bp, Homo sapiens
ttctattgcctgatg

SEQ ID NO: 80735 - DNA, 15 bp, Homo sapiens
tctattgcctgatga

SEQ ID NO: 80736 - DNA, 15 bp, Homo sapiens
ctattgcctgatgaa

SEQ ID NO: 80737 - DNA, 15 bp, Homo sapiens
tattgcctgatgaaa

SEQ ID NO: 80738 - DNA, 15 bp, Homo sapiens
attgcctgatgaaag

SEQ ID NO: 80739 - DNA, 15 bp, Homo sapiens
ttgcctgatgaaagt

SEQ ID NO: 80740 - DNA, 15 bp, Homo sapiens
tgcctgatgaaagta

SEQ ID NO: 80741 - DNA, 15 bp, Homo sapiens
gcctgatgaaagtag

SEQ ID NO: 80742 - DNA, 15 bp, Homo sapiens
cctgatgaaagtaga

SEQ ID NO: 80743 - DNA, 15 bp, Homo sapiens
ctgatgaaagtagac

SEQ ID NO: 80744 - DNA, 15 bp, Homo sapiens
tgatgaaagtagacg

SEQ ID NO: 80745 - DNA, 15 bp, Homo sapiens
gatgaaagtagacgt

SEQ ID NO: 80746 - DNA, 15 bp, Homo sapiens
atgaaagtagacgtg

SEQ ID NO: 80747 - DNA, 15 bp, Homo sapiens
tgaaagtagacgtgt

SEQ ID NO: 80748 - DNA, 15 bp, Homo sapiens
gaaagtagacgtgtc

SEQ ID NO: 80749 - DNA, 15 bp, Homo sapiens
aaagtagacgtgtca

SEQ ID NO: 80750 - DNA, 15 bp, Homo sapiens
aagtagacgtgtcaa

SEQ ID NO: 80751 - DNA, 15 bp, Homo sapiens
agtagacgtgtcaag

SEQ ID NO: 80752 - DNA, 15 bp, Homo sapiens
gtagacgtgtcaaga

SEQ ID NO: 80753 - DNA, 15 bp, Homo sapiens
tagacgtgtcaagaa

SEQ ID NO: 80754 - DNA, 15 bp, Homo sapiens
agacgtgtcaagaaa

SEQ ID NO: 80755 - DNA, 15 bp, Homo sapiens
gacgtgtcaagaaat

SEQ ID NO: 80756 - DNA, 15 bp, Homo sapiens
acgtgtcaagaaata

SEQ ID NO: 80757 - DNA, 15 bp, Homo sapiens
cgtgtcaagaaataa

SEQ ID NO: 80758 - DNA, 15 bp, Homo sapiens
gtgtcaagaaataag

SEQ ID NO: 80759 - DNA, 15 bp, Homo sapiens
tgtcaagaaataaga

SEQ ID NO: 80760 - DNA, 15 bp, Homo sapiens
gtcaagaaataagaa

SEQ ID NO: 80761 - DNA, 15 bp, Homo sapiens
tcaagaaataagaat

SEQ ID NO: 80762 - DNA, 15 bp, Homo sapiens
caagaaataagaatt

SEQ ID NO: 80763 - DNA, 15 bp, Homo sapiens
aagaaataagaattc

SEQ ID NO: 80764 - DNA, 15 bp, Homo sapiens
agaaataagaattct

SEQ ID NO: 80765 - DNA, 15 bp, Homo sapiens
gaaataagaattctc

SEQ ID NO: 80766 - DNA, 15 bp, Homo sapiens
aaataagaattctcc

SEQ ID NO: 80767 - DNA, 15 bp, Homo sapiens
aataagaattctcca

SEQ ID NO: 80768 - DNA, 15 bp, Homo sapiens
ataagaattctccaa

SEQ ID NO: 80769 - DNA, 15 bp, Homo sapiens
taagaattctccaag

SEQ ID NO: 80770 - DNA, 15 bp, Homo sapiens
aagaattctccaagg

SEQ ID NO: 80771 - DNA, 15 bp, Homo sapiens
agaattctccaaggc

SEQ ID NO: 80772 - DNA, 15 bp, Homo sapiens
gaattctccaaggct

SEQ ID NO: 80773 - DNA, 15 bp, Homo sapiens
aattctccaaggctc

SEQ ID NO: 80774 - DNA, 15 bp, Homo sapiens
attctccaaggctct

SEQ ID NO: 80775 - DNA, 15 bp, Homo sapiens
ttctccaaggctctt

SEQ ID NO: 80776 - DNA, 15 bp, Homo sapiens
tctccaaggctcttc

SEQ ID NO: 80777 - DNA, 15 bp, Homo sapiens
ctccaaggctcttca

SEQ ID NO: 80778 - DNA, 15 bp, Homo sapiens
tccaaggctcttcag

SEQ ID NO: 80779 - DNA, 15 bp, Homo sapiens
ccaaggctcttcaga

SEQ ID NO: 80780 - DNA, 15 bp, Homo sapiens
caaggctcttcagat

SEQ ID NO: 80781 - DNA, 15 bp, Homo sapiens
aaggctcttcagata

SEQ ID NO: 80782 - DNA, 15 bp, Homo sapiens
aggctcttcagataa

SEQ ID NO: 80783 - DNA, 15 bp, Homo sapiens
ggctcttcagataaa

SEQ ID NO: 80784 - DNA, 15 bp, Homo sapiens
gctcttcagataaat

SEQ ID NO: 80785 - DNA, 15 bp, Homo sapiens
ctcttcagataaatt

SEQ ID NO: 80786 - DNA, 15 bp, Homo sapiens
tcttcagataaattc

SEQ ID NO: 80787 - DNA, 15 bp, Homo sapiens
cttcagataaattca

SEQ ID NO: 80788 - DNA, 15 bp, Homo sapiens
ttcagataaattcat

SEQ ID NO: 80789 - DNA, 15 bp, Homo sapiens
tcagataaattcatg

SEQ ID NO: 80790 - DNA, 15 bp, Homo sapiens
cagataaattcatgt

SEQ ID NO: 80791 - DNA, 15 bp, Homo sapiens
agataaattcatgtt

SEQ ID NO: 80792 - DNA, 15 bp, Homo sapiens
gataaattcatgttt

SEQ ID NO: 80793 - DNA, 15 bp, Homo sapiens
ataaattcatgtttc

SEQ ID NO: 80794 - DNA, 15 bp, Homo sapiens
taaattcatgtttca

SEQ ID NO: 80795 - DNA, 15 bp, Homo sapiens
aaattcatgtttcat

SEQ ID NO: 80796 - DNA, 15 bp, Homo sapiens
aattcatgtttcatc

SEQ ID NO: 80797 - DNA, 15 bp, Homo sapiens
attcatgtttcatca

SEQ ID NO: 80798 - DNA, 15 bp, Homo sapiens
ttcatgtttcatcat

SEQ ID NO: 80799 - DNA, 15 bp, Homo sapiens
tcatgtttcatcatt

SEQ ID NO: 80800 - DNA, 15 bp, Homo sapiens
catgtttcatcattt

SEQ ID NO: 80801 - DNA, 15 bp, Homo sapiens
atgtttcatcatttt

SEQ ID NO: 80802 - DNA, 15 bp, Homo sapiens
tgtttcatcattttc

SEQ ID NO: 80803 - DNA, 15 bp, Homo sapiens
gtttcatcattttct

SEQ ID NO: 80804 - DNA, 15 bp, Homo sapiens
tttcatcattttctt

SEQ ID NO: 80805 - DNA, 15 bp, Homo sapiens
ttcatcattttcttt

SEQ ID NO: 80806 - DNA, 15 bp, Homo sapiens
tcatcattttctttg

SEQ ID NO: 80807 - DNA, 15 bp, Homo sapiens
catcattttctttgc

SEQ ID NO: 80808 - DNA, 15 bp, Homo sapiens
atcattttctttgcc

SEQ ID NO: 80809 - DNA, 15 bp, Homo sapiens
tcattttctttgcct

SEQ ID NO: 80810 - DNA, 15 bp, Homo sapiens
cattttctttgcctt

SEQ ID NO: 80811 - DNA, 15 bp, Homo sapiens
attttctttgccttc

SEQ ID NO: 80812 - DNA, 15 bp, Homo sapiens
ttttctttgccttca

SEQ ID NO: 80813 - DNA, 15 bp, Homo sapiens
tttctttgccttcaa

SEQ ID NO: 80814 - DNA, 15 bp, Homo sapiens
ttctttgccttcaag

SEQ ID NO: 80815 - DNA, 15 bp, Homo sapiens
tctttgccttcaagt

SEQ ID NO: 80816 - DNA, 15 bp, Homo sapiens
ctttgccttcaagtt

SEQ ID NO: 80817 - DNA, 15 bp, Homo sapiens
tttgccttcaagtta

SEQ ID NO: 80818 - DNA, 15 bp, Homo sapiens
ttgccttcaagttac

SEQ ID NO: 80819 - DNA, 15 bp, Homo sapiens
tgccttcaagttact

SEQ ID NO: 80820 - DNA, 15 bp, Homo sapiens
gccttcaagttactg

SEQ ID NO: 80821 - DNA, 15 bp, Homo sapiens
ccttcaagttactga

SEQ ID NO: 80822 - DNA, 15 bp, Homo sapiens
cttcaagttactgag

SEQ ID NO: 80823 - DNA, 15 bp, Homo sapiens
ttcaagttactgaga

SEQ ID NO: 80824 - DNA, 15 bp, Homo sapiens
tcaagttactgagat

SEQ ID NO: 80825 - DNA, 15 bp, Homo sapiens
caagttactgagatc

SEQ ID NO: 80826 - DNA, 15 bp, Homo sapiens
aagttactgagatca

SEQ ID NO: 80827 - DNA, 15 bp, Homo sapiens
agttactgagatcat

SEQ ID NO: 80828 - DNA, 15 bp, Homo sapiens
gttactgagatcatt

SEQ ID NO: 80829 - DNA, 15 bp, Homo sapiens
ttactgagatcattt

SEQ ID NO: 80830 - DNA, 15 bp, Homo sapiens
tactgagatcatttt

SEQ ID NO: 80831 - DNA, 15 bp, Homo sapiens
actgagatcattttt

SEQ ID NO: 80832 - DNA, 15 bp, Homo sapiens
ctgagatcatttttg

SEQ ID NO: 80833 - DNA, 15 bp, Homo sapiens
tgagatcatttttgg

SEQ ID NO: 80834 - DNA, 15 bp, Homo sapiens
gagatcatttttggc

SEQ ID NO: 80835 - DNA, 15 bp, Homo sapiens
agatcatttttggca

SEQ ID NO: 80836 - DNA, 15 bp, Homo sapiens
gatcatttttggcaa

SEQ ID NO: 80837 - DNA, 15 bp, Homo sapiens
atcatttttggcaag

SEQ ID NO: 80838 - DNA, 15 bp, Homo sapiens
tcatttttggcaaga

SEQ ID NO: 80839 - DNA, 15 bp, Homo sapiens
catttttggcaagat

SEQ ID NO: 80840 - DNA, 15 bp, Homo sapiens
atttttggcaagatc

SEQ ID NO: 80841 - DNA, 15 bp, Homo sapiens
tttttggcaagatct

SEQ ID NO: 80842 - DNA, 15 bp, Homo sapiens
ttttggcaagatctg

SEQ ID NO: 80843 - DNA, 15 bp, Homo sapiens
tttggcaagatctgt

SEQ ID NO: 80844 - DNA, 15 bp, Homo sapiens
ttggcaagatctgta

SEQ ID NO: 80845 - DNA, 15 bp, Homo sapiens
tggcaagatctgtat

SEQ ID NO: 80846 - DNA, 15 bp, Homo sapiens
ggcaagatctgtatc

SEQ ID NO: 80847 - DNA, 15 bp, Homo sapiens
gcaagatctgtatca

SEQ ID NO: 80848 - DNA, 15 bp, Homo sapiens
caagatctgtatcat

SEQ ID NO: 80849 - DNA, 15 bp, Homo sapiens
aagatctgtatcatt

SEQ ID NO: 80850 - DNA, 15 bp, Homo sapiens
agatctgtatcatta

SEQ ID NO: 80851 - DNA, 15 bp, Homo sapiens
gatctgtatcattaa

SEQ ID NO: 80852 - DNA, 15 bp, Homo sapiens
atctgtatcattaat

SEQ ID NO: 80853 - DNA, 15 bp, Homo sapiens
tctgtatcattaatg

SEQ ID NO: 80854 - DNA, 15 bp, Homo sapiens
ctgtatcattaatgc

SEQ ID NO: 80855 - DNA, 15 bp, Homo sapiens
tgtatcattaatgct

SEQ ID NO: 80856 - DNA, 15 bp, Homo sapiens
gtatcattaatgctg

SEQ ID NO: 80857 - DNA, 15 bp, Homo sapiens
tatcattaatgctgt

SEQ ID NO: 80858 - DNA, 15 bp, Homo sapiens
atcattaatgctgtg

SEQ ID NO: 80859 - DNA, 15 bp, Homo sapiens
tcattaatgctgtgt

SEQ ID NO: 80860 - DNA, 15 bp, Homo sapiens
cattaatgctgtgtt

SEQ ID NO: 80861 - DNA, 15 bp, Homo sapiens
attaatgctgtgtta

SEQ ID NO: 80862 - DNA, 15 bp, Homo sapiens
ttaatgctgtgttag

SEQ ID NO: 80863 - DNA, 15 bp, Homo sapiens
taatgctgtgttagg

SEQ ID NO: 80864 - DNA, 15 bp, Homo sapiens
aatgctgtgttagga

SEQ ID NO: 80865 - DNA, 15 bp, Homo sapiens
atgctgtgttaggaa

SEQ ID NO: 80866 - DNA, 15 bp, Homo sapiens
tgctgtgttaggaaa

SEQ ID NO: 80867 - DNA, 15 bp, Homo sapiens
gctgtgttaggaaag

SEQ ID NO: 80868 - DNA, 15 bp, Homo sapiens
ctgtgttaggaaaga

SEQ ID NO: 80869 - DNA, 15 bp, Homo sapiens
tgtgttaggaaagaa

SEQ ID NO: 80870 - DNA, 15 bp, Homo sapiens
gtgttaggaaagaaa

SEQ ID NO: 80871 - DNA, 15 bp, Homo sapiens
tgttaggaaagaaaa

SEQ ID NO: 80872 - DNA, 15 bp, Homo sapiens
gttaggaaagaaaag

SEQ ID NO: 80873 - DNA, 15 bp, Homo sapiens
ttaggaaagaaaaga

SEQ ID NO: 80874 - DNA, 15 bp, Homo sapiens
taggaaagaaaagat

SEQ ID NO: 80875 - DNA, 15 bp, Homo sapiens
aggaaagaaaagatt

SEQ ID NO: 80876 - DNA, 15 bp, Homo sapiens
ggaaagaaaagatta

SEQ ID NO: 80877 - DNA, 15 bp, Homo sapiens
gaaagaaaagattat

SEQ ID NO: 80878 - DNA, 15 bp, Homo sapiens
aaagaaaagattatg

SEQ ID NO: 80879 - DNA, 15 bp, Homo sapiens
aagaaaagattatga

SEQ ID NO: 80880 - DNA, 15 bp, Homo sapiens
agaaaagattatgac

SEQ ID NO: 80881 - DNA, 15 bp, Homo sapiens
gaaaagattatgact

SEQ ID NO: 80882 - DNA, 15 bp, Homo sapiens
aaaagattatgactc

SEQ ID NO: 80883 - DNA, 15 bp, Homo sapiens
aaagattatgactcc

SEQ ID NO: 80884 - DNA, 15 bp, Homo sapiens
aagattatgactcca

SEQ ID NO: 80885 - DNA, 15 bp, Homo sapiens
agattatgactccac

SEQ ID NO: 80886 - DNA, 15 bp, Homo sapiens
gattatgactccaca

SEQ ID NO: 80887 - DNA, 15 bp, Homo sapiens
attatgactccacat

SEQ ID NO: 80888 - DNA, 15 bp, Homo sapiens
ttatgactccacatt

SEQ ID NO: 80889 - DNA, 15 bp, Homo sapiens
tatgactccacattt

SEQ ID NO: 80890 - DNA, 15 bp, Homo sapiens
atgactccacatttt

SEQ ID NO: 80891 - DNA, 15 bp, Homo sapiens
tgactccacatttta

SEQ ID NO: 80892 - DNA, 15 bp, Homo sapiens
gactccacattttac

SEQ ID NO: 80893 - DNA, 15 bp, Homo sapiens
actccacattttact

SEQ ID NO: 80894 - DNA, 15 bp, Homo sapiens
ctccacattttactt

SEQ ID NO: 80895 - DNA, 15 bp, Homo sapiens
tccacattttacttt

SEQ ID NO: 80896 - DNA, 15 bp, Homo sapiens
ccacattttactttc

SEQ ID NO: 80897 - DNA, 15 bp, Homo sapiens
cacattttactttca

SEQ ID NO: 80898 - DNA, 15 bp, Homo sapiens
acattttactttcaa

SEQ ID NO: 80899 - DNA, 15 bp, Homo sapiens
cattttactttcaag

SEQ ID NO: 80900 - DNA, 15 bp, Homo sapiens
attttactttcaagg

SEQ ID NO: 80901 - DNA, 15 bp, Homo sapiens
ttttactttcaaggt

SEQ ID NO: 80902 - DNA, 15 bp, Homo sapiens
tttactttcaaggtt

SEQ ID NO: 80903 - DNA, 15 bp, Homo sapiens
ttactttcaaggttg

SEQ ID NO: 80904 - DNA, 15 bp, Homo sapiens
tactttcaaggttga

SEQ ID NO: 80905 - DNA, 15 bp, Homo sapiens
actttcaaggttgaa

SEQ ID NO: 80906 - DNA, 15 bp, Homo sapiens
ctttcaaggttgaag

SEQ ID NO: 80907 - DNA, 15 bp, Homo sapiens
tttcaaggttgaaga

SEQ ID NO: 80908 - DNA, 15 bp, Homo sapiens
ttcaaggttgaagag

SEQ ID NO: 80909 - DNA, 15 bp, Homo sapiens
tcaaggttgaagagt

SEQ ID NO: 80910 - DNA, 15 bp, Homo sapiens
caaggttgaagagtt

SEQ ID NO: 80911 - DNA, 15 bp, Homo sapiens
aaggttgaagagtta

SEQ ID NO: 80912 - DNA, 15 bp, Homo sapiens
aggttgaagagttaa

SEQ ID NO: 80913 - DNA, 15 bp, Homo sapiens
ggttgaagagttaaa

SEQ ID NO: 80914 - DNA, 15 bp, Homo sapiens
gttgaagagttaaac

SEQ ID NO: 80915 - DNA, 15 bp, Homo sapiens
ttgaagagttaaact

SEQ ID NO: 80916 - DNA, 15 bp, Homo sapiens
tgaagagttaaactg

SEQ ID NO: 80917 - DNA, 15 bp, Homo sapiens
gaagagttaaactgt

SEQ ID NO: 80918 - DNA, 15 bp, Homo sapiens
aagagttaaactgtt

SEQ ID NO: 80919 - DNA, 15 bp, Homo sapiens
agagttaaactgttt

SEQ ID NO: 80920 - DNA, 15 bp, Homo sapiens
gagttaaactgttta

SEQ ID NO: 80921 - DNA, 15 bp, Homo sapiens
agttaaactgtttaa

SEQ ID NO: 80922 - DNA, 15 bp, Homo sapiens
gttaaactgtttaaa

SEQ ID NO: 80923 - DNA, 15 bp, Homo sapiens
ttaaactgtttaaaa

SEQ ID NO: 80924 - DNA, 15 bp, Homo sapiens
taaactgtttaaaaa

SEQ ID NO: 80925 - DNA, 15 bp, Homo sapiens
aaactgtttaaaaag

SEQ ID NO: 80926 - DNA, 15 bp, Homo sapiens
aactgtttaaaaaga

SEQ ID NO: 80927 - DNA, 15 bp, Homo sapiens
actgtttaaaaagag

SEQ ID NO: 80928 - DNA, 15 bp, Homo sapiens
ctgtttaaaaagagt

SEQ ID NO: 80929 - DNA, 15 bp, Homo sapiens
tgtttaaaaagagtg

SEQ ID NO: 80930 - DNA, 15 bp, Homo sapiens
gtttaaaaagagtgt

SEQ ID NO: 80931 - DNA, 15 bp, Homo sapiens
tttaaaaagagtgta

SEQ ID NO: 80932 - DNA, 15 bp, Homo sapiens
ttaaaaagagtgtat

SEQ ID NO: 80933 - DNA, 15 bp, Homo sapiens
taaaaagagtgtatg

SEQ ID NO: 80934 - DNA, 15 bp, Homo sapiens
aaaaagagtgtatgt

SEQ ID NO: 80935 - DNA, 15 bp, Homo sapiens
aaaagagtgtatgtt

SEQ ID NO: 80936 - DNA, 15 bp, Homo sapiens
aaagagtgtatgtta

SEQ ID NO: 80937 - DNA, 15 bp, Homo sapiens
aagagtgtatgttat

SEQ ID NO: 80938 - DNA, 15 bp, Homo sapiens
agagtgtatgttatc

SEQ ID NO: 80939 - DNA, 15 bp, Homo sapiens
gagtgtatgttatcc

SEQ ID NO: 80940 - DNA, 15 bp, Homo sapiens
agtgtatgttatcct

SEQ ID NO: 80941 - DNA, 15 bp, Homo sapiens
gtgtatgttatcctg

SEQ ID NO: 80942 - DNA, 15 bp, Homo sapiens
tgtatgttatcctgt

SEQ ID NO: 80943 - DNA, 15 bp, Homo sapiens
gtatgttatcctgta

SEQ ID NO: 80944 - DNA, 15 bp, Homo sapiens
tatgttatcctgtaa

SEQ ID NO: 80945 - DNA, 15 bp, Homo sapiens
atgttatcctgtaaa

SEQ ID NO: 80946 - DNA, 15 bp, Homo sapiens
tgttatcctgtaaac

SEQ ID NO: 80947 - DNA, 15 bp, Homo sapiens
gttatcctgtaaaca

SEQ ID NO: 80948 - DNA, 15 bp, Homo sapiens
ttatcctgtaaacag

SEQ ID NO: 80949 - DNA, 15 bp, Homo sapiens
tatcctgtaaacagc

SEQ ID NO: 80950 - DNA, 15 bp, Homo sapiens
atcctgtaaacagca

SEQ ID NO: 80951 - DNA, 15 bp, Homo sapiens
tcctgtaaacagcag

SEQ ID NO: 80952 - DNA, 15 bp, Homo sapiens
cctgtaaacagcagt

SEQ ID NO: 80953 - DNA, 15 bp, Homo sapiens
ctgtaaacagcagta

SEQ ID NO: 80954 - DNA, 15 bp, Homo sapiens
tgtaaacagcagtat

SEQ ID NO: 80955 - DNA, 15 bp, Homo sapiens
gtaaacagcagtatc

SEQ ID NO: 80956 - DNA, 15 bp, Homo sapiens
taaacagcagtatca

SEQ ID NO: 80957 - DNA, 15 bp, Homo sapiens
aaacagcagtatcag

SEQ ID NO: 80958 - DNA, 15 bp, Homo sapiens
aacagcagtatcagg

SEQ ID NO: 80959 - DNA, 15 bp, Homo sapiens
acagcagtatcaggc

SEQ ID NO: 80960 - DNA, 15 bp, Homo sapiens
cagcagtatcaggct

SEQ ID NO: 80961 - DNA, 15 bp, Homo sapiens
agcagtatcaggctg

SEQ ID NO: 80962 - DNA, 15 bp, Homo sapiens
gcagtatcaggctgt

SEQ ID NO: 80963 - DNA, 15 bp, Homo sapiens
cagtatcaggctgta

SEQ ID NO: 80964 - DNA, 15 bp, Homo sapiens
agtatcaggctgtag

SEQ ID NO: 80965 - DNA, 15 bp, Homo sapiens
gtatcaggctgtaga

SEQ ID NO: 80966 - DNA, 15 bp, Homo sapiens
tatcaggctgtagaa

SEQ ID NO: 80967 - DNA, 15 bp, Homo sapiens
atcaggctgtagaat

SEQ ID NO: 80968 - DNA, 15 bp, Homo sapiens
tcaggctgtagaatt

SEQ ID NO: 80969 - DNA, 15 bp, Homo sapiens
caggctgtagaattt

SEQ ID NO: 80970 - DNA, 15 bp, Homo sapiens
aggctgtagaatttg

SEQ ID NO: 80971 - DNA, 15 bp, Homo sapiens
ggctgtagaatttgt

SEQ ID NO: 80972 - DNA, 15 bp, Homo sapiens
gctgtagaatttgtc

SEQ ID NO: 80973 - DNA, 15 bp, Homo sapiens
ctgtagaatttgtct

SEQ ID NO: 80974 - DNA, 15 bp, Homo sapiens
tgtagaatttgtctt

SEQ ID NO: 80975 - DNA, 15 bp, Homo sapiens
gtagaatttgtcttc

SEQ ID NO: 80976 - DNA, 15 bp, Homo sapiens
tagaatttgtcttct

SEQ ID NO: 80977 - DNA, 15 bp, Homo sapiens
agaatttgtcttctg

SEQ ID NO: 80978 - DNA, 15 bp, Homo sapiens
gaatttgtcttctga

SEQ ID NO: 80979 - DNA, 15 bp, Homo sapiens
aatttgtcttctgaa

SEQ ID NO: 80980 - DNA, 15 bp, Homo sapiens
atttgtcttctgaaa

SEQ ID NO: 80981 - DNA, 15 bp, Homo sapiens
tttgtcttctgaaag

SEQ ID NO: 80982 - DNA, 15 bp, Homo sapiens
ttgtcttctgaaagc

SEQ ID NO: 80983 - DNA, 15 bp, Homo sapiens
tgtcttctgaaagca

SEQ ID NO: 80984 - DNA, 15 bp, Homo sapiens
gtcttctgaaagcag

SEQ ID NO: 80985 - DNA, 15 bp, Homo sapiens
tcttctgaaagcagg

SEQ ID NO: 80986 - DNA, 15 bp, Homo sapiens
cttctgaaagcaggg

SEQ ID NO: 80987 - DNA, 15 bp, Homo sapiens
ttctgaaagcaggga

SEQ ID NO: 80988 - DNA, 15 bp, Homo sapiens
tctgaaagcagggaa

SEQ ID NO: 80989 - DNA, 15 bp, Homo sapiens
ctgaaagcagggaac

SEQ ID NO: 80990 - DNA, 15 bp, Homo sapiens
tgaaagcagggaact

SEQ ID NO: 80991 - DNA, 15 bp, Homo sapiens
gaaagcagggaactt

SEQ ID NO: 80992 - DNA, 15 bp, Homo sapiens
aaagcagggaactta

SEQ ID NO: 80993 - DNA, 15 bp, Homo sapiens
aagcagggaacttat

SEQ ID NO: 80994 - DNA, 15 bp, Homo sapiens
agcagggaacttata

SEQ ID NO: 80995 - DNA, 15 bp, Homo sapiens
gcagggaacttatat

SEQ ID NO: 80996 - DNA, 15 bp, Homo sapiens
cagggaacttatata

SEQ ID NO: 80997 - DNA, 15 bp, Homo sapiens
agggaacttatatat

SEQ ID NO: 80998 - DNA, 15 bp, Homo sapiens
gggaacttatatata

SEQ ID NO: 80999 - DNA, 15 bp, Homo sapiens
ggaacttatatatag

SEQ ID NO: 81000 - DNA, 15 bp, Homo sapiens
gaacttatatatagc

SEQ ID NO: 81001 - DNA, 15 bp, Homo sapiens
aacttatatatagca

SEQ ID NO: 81002 - DNA, 15 bp, Homo sapiens
acttatatatagcaa

SEQ ID NO: 81003 - DNA, 15 bp, Homo sapiens
cttatatatagcaaa

SEQ ID NO: 81004 - DNA, 15 bp, Homo sapiens
ttatatatagcaaag

SEQ ID NO: 81005 - DNA, 15 bp, Homo sapiens
tatatatagcaaaga

SEQ ID NO: 81006 - DNA, 15 bp, Homo sapiens
atatatagcaaagaa

SEQ ID NO: 81007 - DNA, 15 bp, Homo sapiens
tatatagcaaagaac

SEQ ID NO: 81008 - DNA, 15 bp, Homo sapiens
atatagcaaagaact

SEQ ID NO: 81009 - DNA, 15 bp, Homo sapiens
tatagcaaagaactt

SEQ ID NO: 81010 - DNA, 15 bp, Homo sapiens
atagcaaagaacttc

SEQ ID NO: 81011 - DNA, 15 bp, Homo sapiens
tagcaaagaacttca

SEQ ID NO: 81012 - DNA, 15 bp, Homo sapiens
agcaaagaacttcat

SEQ ID NO: 81013 - DNA, 15 bp, Homo sapiens
gcaaagaacttcata

SEQ ID NO: 81014 - DNA, 15 bp, Homo sapiens
caaagaacttcatag

SEQ ID NO: 81015 - DNA, 15 bp, Homo sapiens
aaagaacttcatagt

SEQ ID NO: 81016 - DNA, 15 bp, Homo sapiens
aagaacttcatagtg

SEQ ID NO: 81017 - DNA, 15 bp, Homo sapiens
agaacttcatagtgc

SEQ ID NO: 81018 - DNA, 15 bp, Homo sapiens
gaacttcatagtgct

SEQ ID NO: 81019 - DNA, 15 bp, Homo sapiens
aacttcatagtgctc

SEQ ID NO: 81020 - DNA, 15 bp, Homo sapiens
acttcatagtgctcc

SEQ ID NO: 81021 - DNA, 15 bp, Homo sapiens
cttcatagtgctccc

SEQ ID NO: 81022 - DNA, 15 bp, Homo sapiens
ttcatagtgctccca

SEQ ID NO: 81023 - DNA, 15 bp, Homo sapiens
tcatagtgctcccat

SEQ ID NO: 81024 - DNA, 15 bp, Homo sapiens
catagtgctcccatt

SEQ ID NO: 81025 - DNA, 15 bp, Homo sapiens
atagtgctcccattt

SEQ ID NO: 81026 - DNA, 15 bp, Homo sapiens
tagtgctcccatttc

SEQ ID NO: 81027 - DNA, 15 bp, Homo sapiens
agtgctcccatttct

SEQ ID NO: 81028 - DNA, 15 bp, Homo sapiens
gtgctcccatttctt

SEQ ID NO: 81029 - DNA, 15 bp, Homo sapiens
tgctcccatttcttg

SEQ ID NO: 81030 - DNA, 15 bp, Homo sapiens
gctcccatttcttga

SEQ ID NO: 81031 - DNA, 15 bp, Homo sapiens
ctcccatttcttgac

SEQ ID NO: 81032 - DNA, 15 bp, Homo sapiens
tcccatttcttgaca

SEQ ID NO: 81033 - DNA, 15 bp, Homo sapiens
cccatttcttgacaa

SEQ ID NO: 81034 - DNA, 15 bp, Homo sapiens
ccatttcttgacaaa

SEQ ID NO: 81035 - DNA, 15 bp, Homo sapiens
catttcttgacaaaa

SEQ ID NO: 81036 - DNA, 15 bp, Homo sapiens
atttcttgacaaaac

SEQ ID NO: 81037 - DNA, 15 bp, Homo sapiens
tttcttgacaaaacc

SEQ ID NO: 81038 - DNA, 15 bp, Homo sapiens
ttcttgacaaaacct

SEQ ID NO: 81039 - DNA, 15 bp, Homo sapiens
tcttgacaaaacctc

SEQ ID NO: 81040 - DNA, 15 bp, Homo sapiens
cttgacaaaacctct

SEQ ID NO: 81041 - DNA, 15 bp, Homo sapiens
ttgacaaaacctctc

SEQ ID NO: 81042 - DNA, 15 bp, Homo sapiens
tgacaaaacctctcg

SEQ ID NO: 81043 - DNA, 15 bp, Homo sapiens
gacaaaacctctcga

SEQ ID NO: 81044 - DNA, 15 bp, Homo sapiens
acaaaacctctcgag

SEQ ID NO: 81045 - DNA, 15 bp, Homo sapiens
caaaacctctcgaga

SEQ ID NO: 81046 - DNA, 15 bp, Homo sapiens
aaaacctctcgagaa

SEQ ID NO: 81047 - DNA, 15 bp, Homo sapiens
aaacctctcgagaag

SEQ ID NO: 81048 - DNA, 15 bp, Homo sapiens
aacctctcgagaagc

SEQ ID NO: 81049 - DNA, 15 bp, Homo sapiens
acctctcgagaagct

SEQ ID NO: 81050 - DNA, 15 bp, Homo sapiens
cctctcgagaagctc

SEQ ID NO: 81051 - DNA, 15 bp, Homo sapiens
ctctcgagaagctct

SEQ ID NO: 81052 - DNA, 15 bp, Homo sapiens
tctcgagaagctctt

SEQ ID NO: 81053 - DNA, 15 bp, Homo sapiens
ctcgagaagctcttg

SEQ ID NO: 81054 - DNA, 15 bp, Homo sapiens
tcgagaagctcttga

SEQ ID NO: 81055 - DNA, 15 bp, Homo sapiens
cgagaagctcttgat

SEQ ID NO: 81056 - DNA, 15 bp, Homo sapiens
gagaagctcttgatt

SEQ ID NO: 81057 - DNA, 15 bp, Homo sapiens
agaagctcttgattg

SEQ ID NO: 81058 - DNA, 15 bp, Homo sapiens
gaagctcttgattga

SEQ ID NO: 81059 - DNA, 15 bp, Homo sapiens
aagctcttgattgaa

SEQ ID NO: 81060 - DNA, 15 bp, Homo sapiens
agctcttgattgaaa

SEQ ID NO: 81061 - DNA, 15 bp, Homo sapiens
gctcttgattgaaag

SEQ ID NO: 81062 - DNA, 15 bp, Homo sapiens
ctcttgattgaaagt

SEQ ID NO: 81063 - DNA, 15 bp, Homo sapiens
tcttgattgaaagtc

SEQ ID NO: 81064 - DNA, 15 bp, Homo sapiens
cttgattgaaagtct

SEQ ID NO: 81065 - DNA, 15 bp, Homo sapiens
ttgattgaaagtctt

SEQ ID NO: 81066 - DNA, 15 bp, Homo sapiens
tgattgaaagtcttg

SEQ ID NO: 81067 - DNA, 15 bp, Homo sapiens
gattgaaagtcttgg

SEQ ID NO: 81068 - DNA, 15 bp, Homo sapiens
attgaaagtcttggc

SEQ ID NO: 81069 - DNA, 15 bp, Homo sapiens
ttgaaagtcttggct

SEQ ID NO: 81070 - DNA, 15 bp, Homo sapiens
tgaaagtcttggctt

SEQ ID NO: 81071 - DNA, 15 bp, Homo sapiens
gaaagtcttggcttt

SEQ ID NO: 81072 - DNA, 15 bp, Homo sapiens
aaagtcttggctttc

SEQ ID NO: 81073 - DNA, 15 bp, Homo sapiens
aagtcttggctttca

SEQ ID NO: 81074 - DNA, 15 bp, Homo sapiens
agtcttggctttcat

SEQ ID NO: 81075 - DNA, 15 bp, Homo sapiens
gtcttggctttcatg

SEQ ID NO: 81076 - DNA, 15 bp, Homo sapiens
tcttggctttcatga

SEQ ID NO: 81077 - DNA, 15 bp, Homo sapiens
cttggctttcatgaa

SEQ ID NO: 81078 - DNA, 15 bp, Homo sapiens
ttggctttcatgaat

SEQ ID NO: 81079 - DNA, 15 bp, Homo sapiens
tggctttcatgaatc

SEQ ID NO: 81080 - DNA, 15 bp, Homo sapiens
ggctttcatgaatct

SEQ ID NO: 81081 - DNA, 15 bp, Homo sapiens
gctttcatgaatctg

SEQ ID NO: 81082 - DNA, 15 bp, Homo sapiens
ctttcatgaatctgg

SEQ ID NO: 81083 - DNA, 15 bp, Homo sapiens
tttcatgaatctggc

SEQ ID NO: 81084 - DNA, 15 bp, Homo sapiens
ttcatgaatctggca

SEQ ID NO: 81085 - DNA, 15 bp, Homo sapiens
tcatgaatctggcag

SEQ ID NO: 81086 - DNA, 15 bp, Homo sapiens
catgaatctggcagc

SEQ ID NO: 81087 - DNA, 15 bp, Homo sapiens
atgaatctggcagct

SEQ ID NO: 81088 - DNA, 15 bp, Homo sapiens
tgaatctggcagctt

SEQ ID NO: 81089 - DNA, 15 bp, Homo sapiens
gaatctggcagcttt

SEQ ID NO: 81090 - DNA, 15 bp, Homo sapiens
aatctggcagctttc

SEQ ID NO: 81091 - DNA, 15 bp, Homo sapiens
atctggcagctttca

SEQ ID NO: 81092 - DNA, 15 bp, Homo sapiens
tctggcagctttcac

SEQ ID NO: 81093 - DNA, 15 bp, Homo sapiens
ctggcagctttcaca

SEQ ID NO: 81094 - DNA, 15 bp, Homo sapiens
tggcagctttcacaa

SEQ ID NO: 81095 - DNA, 15 bp, Homo sapiens
ggcagctttcacaat

SEQ ID NO: 81096 - DNA, 15 bp, Homo sapiens
gcagctttcacaata

SEQ ID NO: 81097 - DNA, 15 bp, Homo sapiens
cagctttcacaatag

SEQ ID NO: 81098 - DNA, 15 bp, Homo sapiens
agctttcacaatagt

SEQ ID NO: 81099 - DNA, 15 bp, Homo sapiens
gctttcacaatagtg

SEQ ID NO: 81100 - DNA, 15 bp, Homo sapiens
ctttcacaatagtgg

SEQ ID NO: 81101 - DNA, 15 bp, Homo sapiens
tttcacaatagtgga

SEQ ID NO: 81102 - DNA, 15 bp, Homo sapiens
ttcacaatagtggat

SEQ ID NO: 81103 - DNA, 15 bp, Homo sapiens
tcacaatagtggatt

SEQ ID NO: 81104 - DNA, 15 bp, Homo sapiens
cacaatagtggattt

SEQ ID NO: 81105 - DNA, 15 bp, Homo sapiens
acaatagtggatttt

SEQ ID NO: 81106 - DNA, 15 bp, Homo sapiens
caatagtggattttt

SEQ ID NO: 81107 - DNA, 15 bp, Homo sapiens
aatagtggatttttc

SEQ ID NO: 81108 - DNA, 15 bp, Homo sapiens
atagtggatttttca

SEQ ID NO: 81109 - DNA, 15 bp, Homo sapiens
tagtggatttttcat

SEQ ID NO: 81110 - DNA, 15 bp, Homo sapiens
agtggatttttcatg

SEQ ID NO: 81111 - DNA, 15 bp, Homo sapiens
gtggatttttcatga

SEQ ID NO: 81112 - DNA, 15 bp, Homo sapiens
tggatttttcatgac

SEQ ID NO: 81113 - DNA, 15 bp, Homo sapiens
ggatttttcatgaca

SEQ ID NO: 81114 - DNA, 15 bp, Homo sapiens
gatttttcatgacaa

SEQ ID NO: 81115 - DNA, 15 bp, Homo sapiens
atttttcatgacaaa

SEQ ID NO: 81116 - DNA, 15 bp, Homo sapiens
tttttcatgacaaat

SEQ ID NO: 81117 - DNA, 15 bp, Homo sapiens
ttttcatgacaaatc

SEQ ID NO: 81118 - DNA, 15 bp, Homo sapiens
tttcatgacaaatca

SEQ ID NO: 81119 - DNA, 15 bp, Homo sapiens
ttcatgacaaatcat

SEQ ID NO: 81120 - DNA, 15 bp, Homo sapiens
tcatgacaaatcatc

SEQ ID NO: 81121 - DNA, 15 bp, Homo sapiens
catgacaaatcatct

SEQ ID NO: 81122 - DNA, 15 bp, Homo sapiens
atgacaaatcatctt

SEQ ID NO: 81123 - DNA, 15 bp, Homo sapiens
tgacaaatcatctta

SEQ ID NO: 81124 - DNA, 15 bp, Homo sapiens
gacaaatcatcttac

SEQ ID NO: 81125 - DNA, 15 bp, Homo sapiens
acaaatcatcttaca

SEQ ID NO: 81126 - DNA, 15 bp, Homo sapiens
caaatcatcttacac

SEQ ID NO: 81127 - DNA, 15 bp, Homo sapiens
aaatcatcttacaca

SEQ ID NO: 81128 - DNA, 15 bp, Homo sapiens
aatcatcttacacag

SEQ ID NO: 81129 - DNA, 15 bp, Homo sapiens
atcatcttacacagg

SEQ ID NO: 81130 - DNA, 15 bp, Homo sapiens
tcatcttacacaggg

SEQ ID NO: 81131 - DNA, 15 bp, Homo sapiens
catcttacacaggga

SEQ ID NO: 81132 - DNA, 15 bp, Homo sapiens
atcttacacagggaa

SEQ ID NO: 81133 - DNA, 15 bp, Homo sapiens
tcttacacagggaat

SEQ ID NO: 81134 - DNA, 15 bp, Homo sapiens
cttacacagggaatt

SEQ ID NO: 81135 - DNA, 15 bp, Homo sapiens
ttacacagggaatta

SEQ ID NO: 81136 - DNA, 15 bp, Homo sapiens
tacacagggaattat

SEQ ID NO: 81137 - DNA, 15 bp, Homo sapiens
acacagggaattatt

SEQ ID NO: 81138 - DNA, 15 bp, Homo sapiens
cacagggaattattc

SEQ ID NO: 81139 - DNA, 15 bp, Homo sapiens
acagggaattattca

SEQ ID NO: 81140 - DNA, 15 bp, Homo sapiens
cagggaattattcaa

SEQ ID NO: 81141 - DNA, 15 bp, Homo sapiens
agggaattattcaag

SEQ ID NO: 81142 - DNA, 15 bp, Homo sapiens
gggaattattcaagg

SEQ ID NO: 81143 - DNA, 15 bp, Homo sapiens
ggaattattcaaggg

SEQ ID NO: 81144 - DNA, 15 bp, Homo sapiens
gaattattcaagggt

SEQ ID NO: 81145 - DNA, 15 bp, Homo sapiens
aattattcaagggtt

SEQ ID NO: 81146 - DNA, 15 bp, Homo sapiens
attattcaagggttg

SEQ ID NO: 81147 - DNA, 15 bp, Homo sapiens
ttattcaagggttgg

SEQ ID NO: 81148 - DNA, 15 bp, Homo sapiens
tattcaagggttggc

SEQ ID NO: 81149 - DNA, 15 bp, Homo sapiens
attcaagggttggca

SEQ ID NO: 81150 - DNA, 15 bp, Homo sapiens
ttcaagggttggcac

SEQ ID NO: 81151 - DNA, 15 bp, Homo sapiens
tcaagggttggcact

SEQ ID NO: 81152 - DNA, 15 bp, Homo sapiens
caagggttggcactt

SEQ ID NO: 81153 - DNA, 15 bp, Homo sapiens
aagggttggcacttg

SEQ ID NO: 81154 - DNA, 15 bp, Homo sapiens
agggttggcacttga

SEQ ID NO: 81155 - DNA, 15 bp, Homo sapiens
gggttggcacttgaa

SEQ ID NO: 81156 - DNA, 15 bp, Homo sapiens
ggttggcacttgaaa

SEQ ID NO: 81157 - DNA, 15 bp, Homo sapiens
gttggcacttgaaac

SEQ ID NO: 81158 - DNA, 15 bp, Homo sapiens
ttggcacttgaaaca

SEQ ID NO: 81159 - DNA, 15 bp, Homo sapiens
tggcacttgaaacag

SEQ ID NO: 81160 - DNA, 15 bp, Homo sapiens
ggcacttgaaacagt

SEQ ID NO: 81161 - DNA, 15 bp, Homo sapiens
gcacttgaaacagta

SEQ ID NO: 81162 - DNA, 15 bp, Homo sapiens
cacttgaaacagtag

SEQ ID NO: 81163 - DNA, 15 bp, Homo sapiens
acttgaaacagtaga

SEQ ID NO: 81164 - DNA, 15 bp, Homo sapiens
cttgaaacagtagaa

SEQ ID NO: 81165 - DNA, 15 bp, Homo sapiens
ttgaaacagtagaat

SEQ ID NO: 81166 - DNA, 15 bp, Homo sapiens
tgaaacagtagaata

SEQ ID NO: 81167 - DNA, 15 bp, Homo sapiens
gaaacagtagaatac

SEQ ID NO: 81168 - DNA, 15 bp, Homo sapiens
aaacagtagaatact

SEQ ID NO: 81169 - DNA, 15 bp, Homo sapiens
aacagtagaatactt

SEQ ID NO: 81170 - DNA, 15 bp, Homo sapiens
acagtagaatacttt

SEQ ID NO: 81171 - DNA, 15 bp, Homo sapiens
cagtagaatactttc

SEQ ID NO: 81172 - DNA, 15 bp, Homo sapiens
agtagaatactttca

SEQ ID NO: 81173 - DNA, 15 bp, Homo sapiens
gtagaatactttcac

SEQ ID NO: 81174 - DNA, 15 bp, Homo sapiens
tagaatactttcaca

SEQ ID NO: 81175 - DNA, 15 bp, Homo sapiens
agaatactttcacaa

SEQ ID NO: 81176 - DNA, 15 bp, Homo sapiens
gaatactttcacaac

SEQ ID NO: 81177 - DNA, 15 bp, Homo sapiens
aatactttcacaaca

SEQ ID NO: 81178 - DNA, 15 bp, Homo sapiens
atactttcacaacaa

SEQ ID NO: 81179 - DNA, 15 bp, Homo sapiens
tactttcacaacaag

SEQ ID NO: 81180 - DNA, 15 bp, Homo sapiens
actttcacaacaaga

SEQ ID NO: 81181 - DNA, 15 bp, Homo sapiens
ctttcacaacaagag

SEQ ID NO: 81182 - DNA, 15 bp, Homo sapiens
tttcacaacaagaga

SEQ ID NO: 81183 - DNA, 15 bp, Homo sapiens
ttcacaacaagagat

SEQ ID NO: 81184 - DNA, 15 bp, Homo sapiens
tcacaacaagagata

SEQ ID NO: 81185 - DNA, 15 bp, Homo sapiens
cacaacaagagataa

SEQ ID NO: 81186 - DNA, 15 bp, Homo sapiens
acaacaagagataag

SEQ ID NO: 81187 - DNA, 15 bp, Homo sapiens
caacaagagataaga

SEQ ID NO: 81188 - DNA, 15 bp, Homo sapiens
aacaagagataagat

SEQ ID NO: 81189 - DNA, 15 bp, Homo sapiens
acaagagataagatt

SEQ ID NO: 81190 - DNA, 15 bp, Homo sapiens
caagagataagattt

SEQ ID NO: 81191 - DNA, 15 bp, Homo sapiens
aagagataagatttc

SEQ ID NO: 81192 - DNA, 15 bp, Homo sapiens
agagataagatttct

SEQ ID NO: 81193 - DNA, 15 bp, Homo sapiens
gagataagatttctt

SEQ ID NO: 81194 - DNA, 15 bp, Homo sapiens
agataagatttcttt

SEQ ID NO: 81195 - DNA, 15 bp, Homo sapiens
gataagatttctttc

SEQ ID NO: 81196 - DNA, 15 bp, Homo sapiens
ataagatttctttca

SEQ ID NO: 81197 - DNA, 15 bp, Homo sapiens
taagatttctttcag

SEQ ID NO: 81198 - DNA, 15 bp, Homo sapiens
aagatttctttcagg

SEQ ID NO: 81199 - DNA, 15 bp, Homo sapiens
agatttctttcagga

SEQ ID NO: 81200 - DNA, 15 bp, Homo sapiens
gatttctttcaggat

SEQ ID NO: 81201 - DNA, 15 bp, Homo sapiens
atttctttcaggatt

SEQ ID NO: 81202 - DNA, 15 bp, Homo sapiens
tttctttcaggattg

SEQ ID NO: 81203 - DNA, 15 bp, Homo sapiens
ttctttcaggattga

SEQ ID NO: 81204 - DNA, 15 bp, Homo sapiens
tctttcaggattgat

SEQ ID NO: 81205 - DNA, 15 bp, Homo sapiens
ctttcaggattgatg

SEQ ID NO: 81206 - DNA, 15 bp, Homo sapiens
tttcaggattgatga

SEQ ID NO: 81207 - DNA, 15 bp, Homo sapiens
ttcaggattgatgac

SEQ ID NO: 81208 - DNA, 15 bp, Homo sapiens
tcaggattgatgaca

SEQ ID NO: 81209 - DNA, 15 bp, Homo sapiens
caggattgatgacag

SEQ ID NO: 81210 - DNA, 15 bp, Homo sapiens
aggattgatgacagt

SEQ ID NO: 81211 - DNA, 15 bp, Homo sapiens
ggattgatgacagtc

SEQ ID NO: 81212 - DNA, 15 bp, Homo sapiens
gattgatgacagtct

SEQ ID NO: 81213 - DNA, 15 bp, Homo sapiens
attgatgacagtctt

SEQ ID NO: 81214 - DNA, 15 bp, Homo sapiens
ttgatgacagtcttg

SEQ ID NO: 81215 - DNA, 15 bp, Homo sapiens
tgatgacagtcttgc

SEQ ID NO: 81216 - DNA, 15 bp, Homo sapiens
gatgacagtcttgca

SEQ ID NO: 81217 - DNA, 15 bp, Homo sapiens
atgacagtcttgcac

SEQ ID NO: 81218 - DNA, 15 bp, Homo sapiens
tgacagtcttgcacc

SEQ ID NO: 81219 - DNA, 15 bp, Homo sapiens
gacagtcttgcaccc

SEQ ID NO: 81220 - DNA, 15 bp, Homo sapiens
acagtcttgcaccct

SEQ ID NO: 81221 - DNA, 15 bp, Homo sapiens
cagtcttgcacccta

SEQ ID NO: 81222 - DNA, 15 bp, Homo sapiens
agtcttgcaccctag

SEQ ID NO: 81223 - DNA, 15 bp, Homo sapiens
gtcttgcaccctagc

SEQ ID NO: 81224 - DNA, 15 bp, Homo sapiens
tcttgcaccctagcg

SEQ ID NO: 81225 - DNA, 15 bp, Homo sapiens
cttgcaccctagcgc

SEQ ID NO: 81226 - DNA, 15 bp, Homo sapiens
ttgcaccctagcgca

SEQ ID NO: 81227 - DNA, 15 bp, Homo sapiens
tgcaccctagcgcat

SEQ ID NO: 81228 - DNA, 15 bp, Homo sapiens
gcaccctagcgcata

SEQ ID NO: 81229 - DNA, 15 bp, Homo sapiens
caccctagcgcatac

SEQ ID NO: 81230 - DNA, 15 bp, Homo sapiens
accctagcgcatact

SEQ ID NO: 81231 - DNA, 15 bp, Homo sapiens
ccctagcgcatactg

SEQ ID NO: 81232 - DNA, 15 bp, Homo sapiens
cctagcgcatactga

SEQ ID NO: 81233 - DNA, 15 bp, Homo sapiens
ctagcgcatactgat

SEQ ID NO: 81234 - DNA, 15 bp, Homo sapiens
tagcgcatactgatg

SEQ ID NO: 81235 - DNA, 15 bp, Homo sapiens
agcgcatactgatga

SEQ ID NO: 81236 - DNA, 15 bp, Homo sapiens
gcgcatactgatgaa

SEQ ID NO: 81237 - DNA, 15 bp, Homo sapiens
cgcatactgatgaag

SEQ ID NO: 81238 - DNA, 15 bp, Homo sapiens
gcatactgatgaaga

SEQ ID NO: 81239 - DNA, 15 bp, Homo sapiens
catactgatgaagag

SEQ ID NO: 81240 - DNA, 15 bp, Homo sapiens
atactgatgaagaga

SEQ ID NO: 81241 - DNA, 15 bp, Homo sapiens
tactgatgaagagag

SEQ ID NO: 81242 - DNA, 15 bp, Homo sapiens
actgatgaagagagc

SEQ ID NO: 81243 - DNA, 15 bp, Homo sapiens
ctgatgaagagagca

SEQ ID NO: 81244 - DNA, 15 bp, Homo sapiens
tgatgaagagagcag

SEQ ID NO: 81245 - DNA, 15 bp, Homo sapiens
gatgaagagagcagt

SEQ ID NO: 81246 - DNA, 15 bp, Homo sapiens
atgaagagagcagtg

SEQ ID NO: 81247 - DNA, 15 bp, Homo sapiens
tgaagagagcagtgg

SEQ ID NO: 81248 - DNA, 15 bp, Homo sapiens
gaagagagcagtggg

SEQ ID NO: 81249 - DNA, 15 bp, Homo sapiens
aagagagcagtgggt

SEQ ID NO: 81250 - DNA, 15 bp, Homo sapiens
agagagcagtgggtg

SEQ ID NO: 81251 - DNA, 15 bp, Homo sapiens
gagagcagtgggtga

SEQ ID NO: 81252 - DNA, 15 bp, Homo sapiens
agagcagtgggtgac

SEQ ID NO: 81253 - DNA, 15 bp, Homo sapiens
gagcagtgggtgacc

SEQ ID NO: 81254 - DNA, 15 bp, Homo sapiens
agcagtgggtgacca

SEQ ID NO: 81255 - DNA, 15 bp, Homo sapiens
gcagtgggtgaccat

SEQ ID NO: 81256 - DNA, 15 bp, Homo sapiens
cagtgggtgaccatg

SEQ ID NO: 81257 - DNA, 15 bp, Homo sapiens
agtgggtgaccatga

SEQ ID NO: 81258 - DNA, 15 bp, Homo sapiens
gtgggtgaccatgac

SEQ ID NO: 81259 - DNA, 15 bp, Homo sapiens
tgggtgaccatgaca

SEQ ID NO: 81260 - DNA, 15 bp, Homo sapiens
gggtgaccatgacat

SEQ ID NO: 81261 - DNA, 15 bp, Homo sapiens
ggtgaccatgacatg

SEQ ID NO: 81262 - DNA, 15 bp, Homo sapiens
gtgaccatgacatgg

SEQ ID NO: 81263 - DNA, 15 bp, Homo sapiens
tgaccatgacatgga

SEQ ID NO: 81264 - DNA, 15 bp, Homo sapiens
gaccatgacatggag

SEQ ID NO: 81265 - DNA, 15 bp, Homo sapiens
accatgacatggaga

SEQ ID NO: 81266 - DNA, 15 bp, Homo sapiens
ccatgacatggagag

SEQ ID NO: 81267 - DNA, 15 bp, Homo sapiens
catgacatggagagc

SEQ ID NO: 81268 - DNA, 15 bp, Homo sapiens
atgacatggagagct

SEQ ID NO: 81269 - DNA, 15 bp, Homo sapiens
tgacatggagagctt

SEQ ID NO: 81270 - DNA, 15 bp, Homo sapiens
gacatggagagcttc

SEQ ID NO: 81271 - DNA, 15 bp, Homo sapiens
acatggagagcttct

SEQ ID NO: 81272 - DNA, 15 bp, Homo sapiens
catggagagcttctg

SEQ ID NO: 81273 - DNA, 15 bp, Homo sapiens
atggagagcttctgt

SEQ ID NO: 81274 - DNA, 15 bp, Homo sapiens
tggagagcttctgtc

SEQ ID NO: 81275 - DNA, 15 bp, Homo sapiens
ggagagcttctgtct

SEQ ID NO: 81276 - DNA, 15 bp, Homo sapiens
gagagcttctgtctt

SEQ ID NO: 81277 - DNA, 15 bp, Homo sapiens
agagcttctgtcttt

SEQ ID NO: 81278 - DNA, 15 bp, Homo sapiens
gagcttctgtcttta

SEQ ID NO: 81279 - DNA, 15 bp, Homo sapiens
agcttctgtctttac

SEQ ID NO: 81280 - DNA, 15 bp, Homo sapiens
gcttctgtctttacc

SEQ ID NO: 81281 - DNA, 15 bp, Homo sapiens
cttctgtctttacca

SEQ ID NO: 81282 - DNA, 15 bp, Homo sapiens
ttctgtctttaccag

SEQ ID NO: 81283 - DNA, 15 bp, Homo sapiens
tctgtctttaccagt

SEQ ID NO: 81284 - DNA, 15 bp, Homo sapiens
ctgtctttaccagtg

SEQ ID NO: 81285 - DNA, 15 bp, Homo sapiens
tgtctttaccagtgc

SEQ ID NO: 81286 - DNA, 15 bp, Homo sapiens
gtctttaccagtgcc

SEQ ID NO: 81287 - DNA, 15 bp, Homo sapiens
tctttaccagtgccc

SEQ ID NO: 81288 - DNA, 15 bp, Homo sapiens
ctttaccagtgcccc

SEQ ID NO: 81289 - DNA, 15 bp, Homo sapiens
tttaccagtgcccca

SEQ ID NO: 81290 - DNA, 15 bp, Homo sapiens
ttaccagtgccccaa

SEQ ID NO: 81291 - DNA, 15 bp, Homo sapiens
taccagtgccccaat

SEQ ID NO: 81292 - DNA, 15 bp, Homo sapiens
accagtgccccaata

SEQ ID NO: 81293 - DNA, 15 bp, Homo sapiens
ccagtgccccaatat

SEQ ID NO: 81294 - DNA, 15 bp, Homo sapiens
cagtgccccaatatc

SEQ ID NO: 81295 - DNA, 15 bp, Homo sapiens
agtgccccaatatca

SEQ ID NO: 81296 - DNA, 15 bp, Homo sapiens
gtgccccaatatcag

SEQ ID NO: 81297 - DNA, 15 bp, Homo sapiens
tgccccaatatcaga

SEQ ID NO: 81298 - DNA, 15 bp, Homo sapiens
gccccaatatcagat

SEQ ID NO: 81299 - DNA, 15 bp, Homo sapiens
ccccaatatcagatg

SEQ ID NO: 81300 - DNA, 15 bp, Homo sapiens
cccaatatcagatgt

SEQ ID NO: 81301 - DNA, 15 bp, Homo sapiens
ccaatatcagatgtg

SEQ ID NO: 81302 - DNA, 15 bp, Homo sapiens
caatatcagatgtgt

SEQ ID NO: 81303 - DNA, 15 bp, Homo sapiens
aatatcagatgtgtt

SEQ ID NO: 81304 - DNA, 15 bp, Homo sapiens
atatcagatgtgttg

SEQ ID NO: 81305 - DNA, 15 bp, Homo sapiens
tatcagatgtgttgt

SEQ ID NO: 81306 - DNA, 15 bp, Homo sapiens
atcagatgtgttgtc

SEQ ID NO: 81307 - DNA, 15 bp, Homo sapiens
tcagatgtgttgtct

SEQ ID NO: 81308 - DNA, 15 bp, Homo sapiens
cagatgtgttgtctg

SEQ ID NO: 81309 - DNA, 15 bp, Homo sapiens
agatgtgttgtctgg

SEQ ID NO: 81310 - DNA, 15 bp, Homo sapiens
gatgtgttgtctggc

SEQ ID NO: 81311 - DNA, 15 bp, Homo sapiens
atgtgttgtctggca

SEQ ID NO: 81312 - DNA, 15 bp, Homo sapiens
tgtgttgtctggcag

SEQ ID NO: 81313 - DNA, 15 bp, Homo sapiens
gtgttgtctggcagt

SEQ ID NO: 81314 - DNA, 15 bp, Homo sapiens
tgttgtctggcagta

SEQ ID NO: 81315 - DNA, 15 bp, Homo sapiens
gttgtctggcagtaa

SEQ ID NO: 81316 - DNA, 15 bp, Homo sapiens
ttgtctggcagtaag

SEQ ID NO: 81317 - DNA, 15 bp, Homo sapiens
tgtctggcagtaagg

SEQ ID NO: 81318 - DNA, 15 bp, Homo sapiens
gtctggcagtaaggt

SEQ ID NO: 81319 - DNA, 15 bp, Homo sapiens
tctggcagtaaggtg

SEQ ID NO: 81320 - DNA, 15 bp, Homo sapiens
ctggcagtaaggtgt

SEQ ID NO: 81321 - DNA, 15 bp, Homo sapiens
tggcagtaaggtgta

SEQ ID NO: 81322 - DNA, 15 bp, Homo sapiens
ggcagtaaggtgtac

SEQ ID NO: 81323 - DNA, 15 bp, Homo sapiens
gcagtaaggtgtact

SEQ ID NO: 81324 - DNA, 15 bp, Homo sapiens
cagtaaggtgtactg

SEQ ID NO: 81325 - DNA, 15 bp, Homo sapiens
agtaaggtgtactgt

SEQ ID NO: 81326 - DNA, 15 bp, Homo sapiens
gtaaggtgtactgtc

SEQ ID NO: 81327 - DNA, 15 bp, Homo sapiens
taaggtgtactgtct

SEQ ID NO: 81328 - DNA, 15 bp, Homo sapiens
aaggtgtactgtctg

SEQ ID NO: 81329 - DNA, 15 bp, Homo sapiens
aggtgtactgtctgc

SEQ ID NO: 81330 - DNA, 15 bp, Homo sapiens
ggtgtactgtctgcc

SEQ ID NO: 81331 - DNA, 15 bp, Homo sapiens
gtgtactgtctgcct

SEQ ID NO: 81332 - DNA, 15 bp, Homo sapiens
tgtactgtctgccta

SEQ ID NO: 81333 - DNA, 15 bp, Homo sapiens
gtactgtctgcctac

SEQ ID NO: 81334 - DNA, 15 bp, Homo sapiens
tactgtctgcctaca

SEQ ID NO: 81335 - DNA, 15 bp, Homo sapiens
actgtctgcctacag

SEQ ID NO: 81336 - DNA, 15 bp, Homo sapiens
ctgtctgcctacaga

SEQ ID NO: 81337 - DNA, 15 bp, Homo sapiens
tgtctgcctacagaa

SEQ ID NO: 81338 - DNA, 15 bp, Homo sapiens
gtctgcctacagaat

SEQ ID NO: 81339 - DNA, 15 bp, Homo sapiens
tctgcctacagaata

SEQ ID NO: 81340 - DNA, 15 bp, Homo sapiens
ctgcctacagaatac

SEQ ID NO: 81341 - DNA, 15 bp, Homo sapiens
tgcctacagaatact

SEQ ID NO: 81342 - DNA, 15 bp, Homo sapiens
gcctacagaatactg

SEQ ID NO: 81343 - DNA, 15 bp, Homo sapiens
cctacagaatactga

SEQ ID NO: 81344 - DNA, 15 bp, Homo sapiens
ctacagaatactgag

SEQ ID NO: 81345 - DNA, 15 bp, Homo sapiens
tacagaatactgagg

SEQ ID NO: 81346 - DNA, 15 bp, Homo sapiens
acagaatactgaggt

SEQ ID NO: 81347 - DNA, 15 bp, Homo sapiens
cagaatactgaggtt

SEQ ID NO: 81348 - DNA, 15 bp, Homo sapiens
agaatactgaggttt

SEQ ID NO: 81349 - DNA, 15 bp, Homo sapiens
gaatactgaggtttc

SEQ ID NO: 81350 - DNA, 15 bp, Homo sapiens
aatactgaggtttct

SEQ ID NO: 81351 - DNA, 15 bp, Homo sapiens
atactgaggtttctt

SEQ ID NO: 81352 - DNA, 15 bp, Homo sapiens
tactgaggtttcttc

SEQ ID NO: 81353 - DNA, 15 bp, Homo sapiens
actgaggtttcttca

SEQ ID NO: 81354 - DNA, 15 bp, Homo sapiens
ctgaggtttcttcag

SEQ ID NO: 81355 - DNA, 15 bp, Homo sapiens
tgaggtttcttcagg

SEQ ID NO: 81356 - DNA, 15 bp, Homo sapiens
gaggtttcttcagga

SEQ ID NO: 81357 - DNA, 15 bp, Homo sapiens
aggtttcttcaggag

SEQ ID NO: 81358 - DNA, 15 bp, Homo sapiens
ggtttcttcaggaga

SEQ ID NO: 81359 - DNA, 15 bp, Homo sapiens
gtttcttcaggagaa

SEQ ID NO: 81360 - DNA, 15 bp, Homo sapiens
tttcttcaggagaag

SEQ ID NO: 81361 - DNA, 15 bp, Homo sapiens
ttcttcaggagaagt

SEQ ID NO: 81362 - DNA, 15 bp, Homo sapiens
tcttcaggagaagtt

SEQ ID NO: 81363 - DNA, 15 bp, Homo sapiens
cttcaggagaagttt

SEQ ID NO: 81364 - DNA, 15 bp, Homo sapiens
ttcaggagaagtttt

SEQ ID NO: 81365 - DNA, 15 bp, Homo sapiens
tcaggagaagttttt

SEQ ID NO: 81366 - DNA, 15 bp, Homo sapiens
caggagaagtttttt

SEQ ID NO: 81367 - DNA, 15 bp, Homo sapiens
aggagaagttttttg

SEQ ID NO: 81368 - DNA, 15 bp, Homo sapiens
ggagaagttttttgg

SEQ ID NO: 81369 - DNA, 15 bp, Homo sapiens
gagaagttttttggt

SEQ ID NO: 81370 - DNA, 15 bp, Homo sapiens
agaagttttttggta

SEQ ID NO: 81371 - DNA, 15 bp, Homo sapiens
gaagttttttggtaa

SEQ ID NO: 81372 - DNA, 15 bp, Homo sapiens
aagttttttggtaaa

SEQ ID NO: 81373 - DNA, 15 bp, Homo sapiens
agttttttggtaaag

SEQ ID NO: 81374 - DNA, 15 bp, Homo sapiens
gttttttggtaaaga

SEQ ID NO: 81375 - DNA, 15 bp, Homo sapiens
ttttttggtaaagaa

SEQ ID NO: 81376 - DNA, 15 bp, Homo sapiens
tttttggtaaagaaa

SEQ ID NO: 81377 - DNA, 15 bp, Homo sapiens
ttttggtaaagaaac

SEQ ID NO: 81378 - DNA, 15 bp, Homo sapiens
tttggtaaagaaact

SEQ ID NO: 81379 - DNA, 15 bp, Homo sapiens
ttggtaaagaaactt

SEQ ID NO: 81380 - DNA, 15 bp, Homo sapiens
tggtaaagaaacttt

SEQ ID NO: 81381 - DNA, 15 bp, Homo sapiens
ggtaaagaaacttta

SEQ ID NO: 81382 - DNA, 15 bp, Homo sapiens
gtaaagaaactttac

SEQ ID NO: 81383 - DNA, 15 bp, Homo sapiens
taaagaaactttacc

SEQ ID NO: 81384 - DNA, 15 bp, Homo sapiens
aaagaaactttacca

SEQ ID NO: 81385 - DNA, 15 bp, Homo sapiens
aagaaactttaccat

SEQ ID NO: 81386 - DNA, 15 bp, Homo sapiens
agaaactttaccatt

SEQ ID NO: 81387 - DNA, 15 bp, Homo sapiens
gaaactttaccattt

SEQ ID NO: 81388 - DNA, 15 bp, Homo sapiens
aaactttaccatttt

SEQ ID NO: 81389 - DNA, 15 bp, Homo sapiens
aactttaccattttg

SEQ ID NO: 81390 - DNA, 15 bp, Homo sapiens
actttaccattttga

SEQ ID NO: 81391 - DNA, 15 bp, Homo sapiens
ctttaccattttgaa

SEQ ID NO: 81392 - DNA, 15 bp, Homo sapiens
tttaccattttgaaa

SEQ ID NO: 81393 - DNA, 15 bp, Homo sapiens
ttaccattttgaaag

SEQ ID NO: 81394 - DNA, 15 bp, Homo sapiens
taccattttgaaagt

SEQ ID NO: 81395 - DNA, 15 bp, Homo sapiens
accattttgaaagtg

SEQ ID NO: 81396 - DNA, 15 bp, Homo sapiens
ccattttgaaagtgt

SEQ ID NO: 81397 - DNA, 15 bp, Homo sapiens
cattttgaaagtgtt

SEQ ID NO: 81398 - DNA, 15 bp, Homo sapiens
attttgaaagtgtta

SEQ ID NO: 81399 - DNA, 15 bp, Homo sapiens
ttttgaaagtgttaa

SEQ ID NO: 81400 - DNA, 15 bp, Homo sapiens
tttgaaagtgttaat

SEQ ID NO: 81401 - DNA, 15 bp, Homo sapiens
ttgaaagtgttaatg

SEQ ID NO: 81402 - DNA, 15 bp, Homo sapiens
tgaaagtgttaatgt

SEQ ID NO: 81403 - DNA, 15 bp, Homo sapiens
gaaagtgttaatgtt

SEQ ID NO: 81404 - DNA, 15 bp, Homo sapiens
aaagtgttaatgttt

SEQ ID NO: 81405 - DNA, 15 bp, Homo sapiens
aagtgttaatgtttt

SEQ ID NO: 81406 - DNA, 15 bp, Homo sapiens
agtgttaatgttttc

SEQ ID NO: 81407 - DNA, 15 bp, Homo sapiens
gtgttaatgttttct

SEQ ID NO: 81408 - DNA, 15 bp, Homo sapiens
tgttaatgttttctg

SEQ ID NO: 81409 - DNA, 15 bp, Homo sapiens
gttaatgttttctga

SEQ ID NO: 81410 - DNA, 15 bp, Homo sapiens
ttaatgttttctgaa

SEQ ID NO: 81411 - DNA, 15 bp, Homo sapiens
taatgttttctgaag

SEQ ID NO: 81412 - DNA, 15 bp, Homo sapiens
aatgttttctgaagc

SEQ ID NO: 81413 - DNA, 15 bp, Homo sapiens
atgttttctgaagct

SEQ ID NO: 81414 - DNA, 15 bp, Homo sapiens
tgttttctgaagctt

SEQ ID NO: 81415 - DNA, 15 bp, Homo sapiens
gttttctgaagcttc

SEQ ID NO: 81416 - DNA, 15 bp, Homo sapiens
ttttctgaagcttcc

SEQ ID NO: 81417 - DNA, 15 bp, Homo sapiens
tttctgaagcttcca

SEQ ID NO: 81418 - DNA, 15 bp, Homo sapiens
ttctgaagcttccaa

SEQ ID NO: 81419 - DNA, 15 bp, Homo sapiens
tctgaagcttccaaa

SEQ ID NO: 81420 - DNA, 15 bp, Homo sapiens
ctgaagcttccaaaa

SEQ ID NO: 81421 - DNA, 15 bp, Homo sapiens
tgaagcttccaaaaa

SEQ ID NO: 81422 - DNA, 15 bp, Homo sapiens
gaagcttccaaaaag

SEQ ID NO: 81423 - DNA, 15 bp, Homo sapiens
aagcttccaaaaaga

SEQ ID NO: 81424 - DNA, 15 bp, Homo sapiens
agcttccaaaaagat

SEQ ID NO: 81425 - DNA, 15 bp, Homo sapiens
gcttccaaaaagatt

SEQ ID NO: 81426 - DNA, 15 bp, Homo sapiens
cttccaaaaagattc

SEQ ID NO: 81427 - DNA, 15 bp, Homo sapiens
ttccaaaaagattcc

SEQ ID NO: 81428 - DNA, 15 bp, Homo sapiens
tccaaaaagattcca

SEQ ID NO: 81429 - DNA, 15 bp, Homo sapiens
ccaaaaagattccaa

SEQ ID NO: 81430 - DNA, 15 bp, Homo sapiens
caaaaagattccaaa

SEQ ID NO: 81431 - DNA, 15 bp, Homo sapiens
aaaaagattccaaaa

SEQ ID NO: 81432 - DNA, 15 bp, Homo sapiens
aaaagattccaaaat

SEQ ID NO: 81433 - DNA, 15 bp, Homo sapiens
aaagattccaaaatg

SEQ ID NO: 81434 - DNA, 15 bp, Homo sapiens
aagattccaaaatgg

SEQ ID NO: 81435 - DNA, 15 bp, Homo sapiens
agattccaaaatggg

SEQ ID NO: 81436 - DNA, 15 bp, Homo sapiens
gattccaaaatggga

SEQ ID NO: 81437 - DNA, 15 bp, Homo sapiens
attccaaaatgggaa

SEQ ID NO: 81438 - DNA, 15 bp, Homo sapiens
ttccaaaatgggaat

SEQ ID NO: 81439 - DNA, 15 bp, Homo sapiens
tccaaaatgggaatg

SEQ ID NO: 81440 - DNA, 15 bp, Homo sapiens
ccaaaatgggaatgt

SEQ ID NO: 81441 - DNA, 15 bp, Homo sapiens
caaaatgggaatgtt

SEQ ID NO: 81442 - DNA, 15 bp, Homo sapiens
aaaatgggaatgttt

SEQ ID NO: 81443 - DNA, 15 bp, Homo sapiens
aaatgggaatgtttc

SEQ ID NO: 81444 - DNA, 15 bp, Homo sapiens
aatgggaatgtttcc

SEQ ID NO: 81445 - DNA, 15 bp, Homo sapiens
atgggaatgtttcct

SEQ ID NO: 81446 - DNA, 15 bp, Homo sapiens
tgggaatgtttcctt

SEQ ID NO: 81447 - DNA, 15 bp, Homo sapiens
gggaatgtttccttg

SEQ ID NO: 81448 - DNA, 15 bp, Homo sapiens
ggaatgtttccttga

SEQ ID NO: 81449 - DNA, 15 bp, Homo sapiens
gaatgtttccttgat

SEQ ID NO: 81450 - DNA, 15 bp, Homo sapiens
aatgtttccttgatt

SEQ ID NO: 81451 - DNA, 15 bp, Homo sapiens
atgtttccttgattg

SEQ ID NO: 81452 - DNA, 15 bp, Homo sapiens
tgtttccttgattgt

SEQ ID NO: 81453 - DNA, 15 bp, Homo sapiens
gtttccttgattgtg

SEQ ID NO: 81454 - DNA, 15 bp, Homo sapiens
tttccttgattgtgt

SEQ ID NO: 81455 - DNA, 15 bp, Homo sapiens
ttccttgattgtgtc

SEQ ID NO: 81456 - DNA, 15 bp, Homo sapiens
tccttgattgtgtca

SEQ ID NO: 81457 - DNA, 15 bp, Homo sapiens
ccttgattgtgtcac

SEQ ID NO: 81458 - DNA, 15 bp, Homo sapiens
cttgattgtgtcacc

SEQ ID NO: 81459 - DNA, 15 bp, Homo sapiens
ttgattgtgtcacca

SEQ ID NO: 81460 - DNA, 15 bp, Homo sapiens
tgattgtgtcaccat

SEQ ID NO: 81461 - DNA, 15 bp, Homo sapiens
gattgtgtcaccatg

SEQ ID NO: 81462 - DNA, 15 bp, Homo sapiens
attgtgtcaccatgc

SEQ ID NO: 81463 - DNA, 15 bp, Homo sapiens
ttgtgtcaccatgct

SEQ ID NO: 81464 - DNA, 15 bp, Homo sapiens
tgtgtcaccatgctt

SEQ ID NO: 81465 - DNA, 15 bp, Homo sapiens
gtgtcaccatgcttg

SEQ ID NO: 81466 - DNA, 15 bp, Homo sapiens
tgtcaccatgcttgc

SEQ ID NO: 81467 - DNA, 15 bp, Homo sapiens
gtcaccatgcttgca

SEQ ID NO: 81468 - DNA, 15 bp, Homo sapiens
tcaccatgcttgcat

SEQ ID NO: 81469 - DNA, 15 bp, Homo sapiens
caccatgcttgcatt

SEQ ID NO: 81470 - DNA, 15 bp, Homo sapiens
accatgcttgcattt

SEQ ID NO: 81471 - DNA, 15 bp, Homo sapiens
ccatgcttgcatttg

SEQ ID NO: 81472 - DNA, 15 bp, Homo sapiens
catgcttgcatttga

SEQ ID NO: 81473 - DNA, 15 bp, Homo sapiens
atgcttgcatttgat

SEQ ID NO: 81474 - DNA, 15 bp, Homo sapiens
tgcttgcatttgatg

SEQ ID NO: 81475 - DNA, 15 bp, Homo sapiens
gcttgcatttgatga

SEQ ID NO: 81476 - DNA, 15 bp, Homo sapiens
cttgcatttgatgaa

SEQ ID NO: 81477 - DNA, 15 bp, Homo sapiens
ttgcatttgatgaaa

SEQ ID NO: 81478 - DNA, 15 bp, Homo sapiens
tgcatttgatgaaaa

SEQ ID NO: 81479 - DNA, 15 bp, Homo sapiens
gcatttgatgaaaac

SEQ ID NO: 81480 - DNA, 15 bp, Homo sapiens
catttgatgaaaact

SEQ ID NO: 81481 - DNA, 15 bp, Homo sapiens
atttgatgaaaactt

SEQ ID NO: 81482 - DNA, 15 bp, Homo sapiens
tttgatgaaaacttg

SEQ ID NO: 81483 - DNA, 15 bp, Homo sapiens
ttgatgaaaacttgt

SEQ ID NO: 81484 - DNA, 15 bp, Homo sapiens
tgatgaaaacttgta

SEQ ID NO: 81485 - DNA, 15 bp, Homo sapiens
gatgaaaacttgtag

SEQ ID NO: 81486 - DNA, 15 bp, Homo sapiens
atgaaaacttgtagc

SEQ ID NO: 81487 - DNA, 15 bp, Homo sapiens
tgaaaacttgtagcc

SEQ ID NO: 81488 - DNA, 15 bp, Homo sapiens
gaaaacttgtagccg

SEQ ID NO: 81489 - DNA, 15 bp, Homo sapiens
aaaacttgtagccgg

SEQ ID NO: 81490 - DNA, 15 bp, Homo sapiens
aaacttgtagccggc

SEQ ID NO: 81491 - DNA, 15 bp, Homo sapiens
aacttgtagccggct

SEQ ID NO: 81492 - DNA, 15 bp, Homo sapiens
acttgtagccggcta

SEQ ID NO: 81493 - DNA, 15 bp, Homo sapiens
cttgtagccggctat

SEQ ID NO: 81494 - DNA, 15 bp, Homo sapiens
ttgtagccggctata

SEQ ID NO: 81495 - DNA, 15 bp, Homo sapiens
tgtagccggctatac

SEQ ID NO: 81496 - DNA, 15 bp, Homo sapiens
gtagccggctatact

SEQ ID NO: 81497 - DNA, 15 bp, Homo sapiens
tagccggctatactg

SEQ ID NO: 81498 - DNA, 15 bp, Homo sapiens
agccggctatactga

SEQ ID NO: 81499 - DNA, 15 bp, Homo sapiens
gccggctatactgag

SEQ ID NO: 81500 - DNA, 15 bp, Homo sapiens
ccggctatactgaga

SEQ ID NO: 81501 - DNA, 15 bp, Homo sapiens
cggctatactgagaa

SEQ ID NO: 81502 - DNA, 15 bp, Homo sapiens
ggctatactgagaaa

SEQ ID NO: 81503 - DNA, 15 bp, Homo sapiens
gctatactgagaaat

SEQ ID NO: 81504 - DNA, 15 bp, Homo sapiens
ctatactgagaaatc

SEQ ID NO: 81505 - DNA, 15 bp, Homo sapiens
tatactgagaaatca

SEQ ID NO: 81506 - DNA, 15 bp, Homo sapiens
atactgagaaatcat

SEQ ID NO: 81507 - DNA, 15 bp, Homo sapiens
tactgagaaatcata

SEQ ID NO: 81508 - DNA, 15 bp, Homo sapiens
actgagaaatcatat

SEQ ID NO: 81509 - DNA, 15 bp, Homo sapiens
ctgagaaatcatatc

SEQ ID NO: 81510 - DNA, 15 bp, Homo sapiens
tgagaaatcatatct

SEQ ID NO: 81511 - DNA, 15 bp, Homo sapiens
gagaaatcatatctg

SEQ ID NO: 81512 - DNA, 15 bp, Homo sapiens
agaaatcatatctga

SEQ ID NO: 81513 - DNA, 15 bp, Homo sapiens
gaaatcatatctgaa

SEQ ID NO: 81514 - DNA, 15 bp, Homo sapiens
aaatcatatctgaag

SEQ ID NO: 81515 - DNA, 15 bp, Homo sapiens
aatcatatctgaaga

SEQ ID NO: 81516 - DNA, 15 bp, Homo sapiens
atcatatctgaagaa

SEQ ID NO: 81517 - DNA, 15 bp, Homo sapiens
tcatatctgaagaaa

SEQ ID NO: 81518 - DNA, 15 bp, Homo sapiens
catatctgaagaaag

SEQ ID NO: 81519 - DNA, 15 bp, Homo sapiens
atatctgaagaaagg

SEQ ID NO: 81520 - DNA, 15 bp, Homo sapiens
tatctgaagaaaggt

SEQ ID NO: 81521 - DNA, 15 bp, Homo sapiens
atctgaagaaaggtg

SEQ ID NO: 81522 - DNA, 15 bp, Homo sapiens
tctgaagaaaggtgg

SEQ ID NO: 81523 - DNA, 15 bp, Homo sapiens
ctgaagaaaggtggt

SEQ ID NO: 81524 - DNA, 15 bp, Homo sapiens
tgaagaaaggtggta

SEQ ID NO: 81525 - DNA, 15 bp, Homo sapiens
gaagaaaggtggtac

SEQ ID NO: 81526 - DNA, 15 bp, Homo sapiens
aagaaaggtggtact

SEQ ID NO: 81527 - DNA, 15 bp, Homo sapiens
agaaaggtggtactt

SEQ ID NO: 81528 - DNA, 15 bp, Homo sapiens
gaaaggtggtacttc

SEQ ID NO: 81529 - DNA, 15 bp, Homo sapiens
aaaggtggtacttcc

SEQ ID NO: 81530 - DNA, 15 bp, Homo sapiens
aaggtggtacttcca

SEQ ID NO: 81531 - DNA, 15 bp, Homo sapiens
aggtggtacttccaa

SEQ ID NO: 81532 - DNA, 15 bp, Homo sapiens
ggtggtacttccaat

SEQ ID NO: 81533 - DNA, 15 bp, Homo sapiens
gtggtacttccaatc

SEQ ID NO: 81534 - DNA, 15 bp, Homo sapiens
tggtacttccaatct

SEQ ID NO: 81535 - DNA, 15 bp, Homo sapiens
ggtacttccaatctt

SEQ ID NO: 81536 - DNA, 15 bp, Homo sapiens
gtacttccaatcttt

SEQ ID NO: 81537 - DNA, 15 bp, Homo sapiens
tacttccaatctttt

SEQ ID NO: 81538 - DNA, 15 bp, Homo sapiens
acttccaatcttttt

SEQ ID NO: 81539 - DNA, 15 bp, Homo sapiens
cttccaatctttttg

SEQ ID NO: 81540 - DNA, 15 bp, Homo sapiens
ttccaatctttttgt

SEQ ID NO: 81541 - DNA, 15 bp, Homo sapiens
tccaatctttttgtg

SEQ ID NO: 81542 - DNA, 15 bp, Homo sapiens
ccaatctttttgtga

SEQ ID NO: 81543 - DNA, 15 bp, Homo sapiens
caatctttttgtgac

SEQ ID NO: 81544 - DNA, 15 bp, Homo sapiens
aatctttttgtgacc

SEQ ID NO: 81545 - DNA, 15 bp, Homo sapiens
atctttttgtgacct

SEQ ID NO: 81546 - DNA, 15 bp, Homo sapiens
tctttttgtgaccta

SEQ ID NO: 81547 - DNA, 15 bp, Homo sapiens
ctttttgtgacctac

SEQ ID NO: 81548 - DNA, 15 bp, Homo sapiens
tttttgtgacctact

SEQ ID NO: 81549 - DNA, 15 bp, Homo sapiens
ttttgtgacctactt

SEQ ID NO: 81550 - DNA, 15 bp, Homo sapiens
tttgtgacctacttt

SEQ ID NO: 81551 - DNA, 15 bp, Homo sapiens
ttgtgacctacttta

SEQ ID NO: 81552 - DNA, 15 bp, Homo sapiens
tgtgacctactttat

SEQ ID NO: 81553 - DNA, 15 bp, Homo sapiens
gtgacctactttatt

SEQ ID NO: 81554 - DNA, 15 bp, Homo sapiens
tgacctactttatta

SEQ ID NO: 81555 - DNA, 15 bp, Homo sapiens
gacctactttattat

SEQ ID NO: 81556 - DNA, 15 bp, Homo sapiens
acctactttattatt

SEQ ID NO: 81557 - DNA, 15 bp, Homo sapiens
cctactttattattg

SEQ ID NO: 81558 - DNA, 15 bp, Homo sapiens
ctactttattattgt

SEQ ID NO: 81559 - DNA, 15 bp, Homo sapiens
tactttattattgtt

SEQ ID NO: 81560 - DNA, 15 bp, Homo sapiens
actttattattgttt

SEQ ID NO: 81561 - DNA, 15 bp, Homo sapiens
ctttattattgtttt

SEQ ID NO: 81562 - DNA, 15 bp, Homo sapiens
tttattattgttttt

SEQ ID NO: 81563 - DNA, 15 bp, Homo sapiens
ttattattgtttttt

SEQ ID NO: 81564 - DNA, 15 bp, Homo sapiens
tattattgttttttt

SEQ ID NO: 81565 - DNA, 15 bp, Homo sapiens
attattgttttttta

SEQ ID NO: 81566 - DNA, 15 bp, Homo sapiens
ttattgtttttttaa

SEQ ID NO: 81567 - DNA, 15 bp, Homo sapiens
tattgtttttttaat

SEQ ID NO: 81568 - DNA, 15 bp, Homo sapiens
attgtttttttaatg

SEQ ID NO: 81569 - DNA, 15 bp, Homo sapiens
ttgtttttttaatgt

SEQ ID NO: 81570 - DNA, 15 bp, Homo sapiens
tgtttttttaatgtc

SEQ ID NO: 81571 - DNA, 15 bp, Homo sapiens
gtttttttaatgtca

SEQ ID NO: 81572 - DNA, 15 bp, Homo sapiens
tttttttaatgtcag

SEQ ID NO: 81573 - DNA, 15 bp, Homo sapiens
ttttttaatgtcagg

SEQ ID NO: 81574 - DNA, 15 bp, Homo sapiens
tttttaatgtcaggg

SEQ ID NO: 81575 - DNA, 15 bp, Homo sapiens
ttttaatgtcagggt

SEQ ID NO: 81576 - DNA, 15 bp, Homo sapiens
tttaatgtcagggtt

SEQ ID NO: 81577 - DNA, 15 bp, Homo sapiens
ttaatgtcagggttt

SEQ ID NO: 81578 - DNA, 15 bp, Homo sapiens
taatgtcagggtttt

SEQ ID NO: 81579 - DNA, 15 bp, Homo sapiens
aatgtcagggttttt

SEQ ID NO: 81580 - DNA, 15 bp, Homo sapiens
atgtcagggtttttt

SEQ ID NO: 81581 - DNA, 15 bp, Homo sapiens
tgtcagggttttttt

SEQ ID NO: 81582 - DNA, 15 bp, Homo sapiens
gtcagggtttttttt

SEQ ID NO: 81583 - DNA, 15 bp, Homo sapiens
tcagggttttttttg

SEQ ID NO: 81584 - DNA, 15 bp, Homo sapiens
cagggttttttttgg

SEQ ID NO: 81585 - DNA, 15 bp, Homo sapiens
agggttttttttgga

SEQ ID NO: 81586 - DNA, 15 bp, Homo sapiens
gggttttttttggaa

SEQ ID NO: 81587 - DNA, 15 bp, Homo sapiens
ggttttttttggaat

SEQ ID NO: 81588 - DNA, 15 bp, Homo sapiens
gttttttttggaatg

SEQ ID NO: 81589 - DNA, 15 bp, Homo sapiens
ttttttttggaatgg

SEQ ID NO: 81590 - DNA, 15 bp, Homo sapiens
tttttttggaatgga

SEQ ID NO: 81591 - DNA, 15 bp, Homo sapiens
ttttttggaatggag

SEQ ID NO: 81592 - DNA, 15 bp, Homo sapiens
tttttggaatggaga

SEQ ID NO: 81593 - DNA, 15 bp, Homo sapiens
ttttggaatggagaa

SEQ ID NO: 81594 - DNA, 15 bp, Homo sapiens
tttggaatggagaaa

SEQ ID NO: 81595 - DNA, 15 bp, Homo sapiens
ttggaatggagaaaa

SEQ ID NO: 81596 - DNA, 15 bp, Homo sapiens
tggaatggagaaaag

SEQ ID NO: 81597 - DNA, 15 bp, Homo sapiens
ggaatggagaaaagt

SEQ ID NO: 81598 - DNA, 15 bp, Homo sapiens
gaatggagaaaagta

SEQ ID NO: 81599 - DNA, 15 bp, Homo sapiens
aatggagaaaagtat

SEQ ID NO: 81600 - DNA, 15 bp, Homo sapiens
atggagaaaagtatt

SEQ ID NO: 81601 - DNA, 15 bp, Homo sapiens
tggagaaaagtattt

SEQ ID NO: 81602 - DNA, 15 bp, Homo sapiens
ggagaaaagtatttg

SEQ ID NO: 81603 - DNA, 15 bp, Homo sapiens
gagaaaagtatttga

SEQ ID NO: 81604 - DNA, 15 bp, Homo sapiens
agaaaagtatttgat

SEQ ID NO: 81605 - DNA, 15 bp, Homo sapiens
gaaaagtatttgata

SEQ ID NO: 81606 - DNA, 15 bp, Homo sapiens
aaaagtatttgatag

SEQ ID NO: 81607 - DNA, 15 bp, Homo sapiens
aaagtatttgataga

SEQ ID NO: 81608 - DNA, 15 bp, Homo sapiens
aagtatttgatagag

SEQ ID NO: 81609 - DNA, 15 bp, Homo sapiens
agtatttgatagagg

SEQ ID NO: 81610 - DNA, 15 bp, Homo sapiens
gtatttgatagaggt

SEQ ID NO: 81611 - DNA, 15 bp, Homo sapiens
tatttgatagaggta

SEQ ID NO: 81612 - DNA, 15 bp, Homo sapiens
atttgatagaggtat

SEQ ID NO: 81613 - DNA, 15 bp, Homo sapiens
tttgatagaggtatt

SEQ ID NO: 81614 - DNA, 15 bp, Homo sapiens
ttgatagaggtattg

SEQ ID NO: 81615 - DNA, 15 bp, Homo sapiens
tgatagaggtattgc

SEQ ID NO: 81616 - DNA, 15 bp, Homo sapiens
gatagaggtattgca

SEQ ID NO: 81617 - DNA, 15 bp, Homo sapiens
atagaggtattgcaa

SEQ ID NO: 81618 - DNA, 15 bp, Homo sapiens
tagaggtattgcaac

SEQ ID NO: 81619 - DNA, 15 bp, Homo sapiens
agaggtattgcaaca

SEQ ID NO: 81620 - DNA, 15 bp, Homo sapiens
gaggtattgcaacag

SEQ ID NO: 81621 - DNA, 15 bp, Homo sapiens
aggtattgcaacagt

SEQ ID NO: 81622 - DNA, 15 bp, Homo sapiens
ggtattgcaacagtc

SEQ ID NO: 81623 - DNA, 15 bp, Homo sapiens
gtattgcaacagtct

SEQ ID NO: 81624 - DNA, 15 bp, Homo sapiens
tattgcaacagtctt

SEQ ID NO: 81625 - DNA, 15 bp, Homo sapiens
attgcaacagtctta

SEQ ID NO: 81626 - DNA, 15 bp, Homo sapiens
ttgcaacagtcttat

SEQ ID NO: 81627 - DNA, 15 bp, Homo sapiens
tgcaacagtcttatt

SEQ ID NO: 81628 - DNA, 15 bp, Homo sapiens
gcaacagtcttattc

SEQ ID NO: 81629 - DNA, 15 bp, Homo sapiens
caacagtcttattct

SEQ ID NO: 81630 - DNA, 15 bp, Homo sapiens
aacagtcttattctt

SEQ ID NO: 81631 - DNA, 15 bp, Homo sapiens
acagtcttattcttc

SEQ ID NO: 81632 - DNA, 15 bp, Homo sapiens
cagtcttattcttct

SEQ ID NO: 81633 - DNA, 15 bp, Homo sapiens
agtcttattcttctt

SEQ ID NO: 81634 - DNA, 15 bp, Homo sapiens
gtcttattcttcttc

SEQ ID NO: 81635 - DNA, 15 bp, Homo sapiens
tcttattcttcttca

SEQ ID NO: 81636 - DNA, 15 bp, Homo sapiens
cttattcttcttcat

SEQ ID NO: 81637 - DNA, 15 bp, Homo sapiens
ttattcttcttcatg

SEQ ID NO: 81638 - DNA, 15 bp, Homo sapiens
tattcttcttcatgc

SEQ ID NO: 81639 - DNA, 15 bp, Homo sapiens
attcttcttcatgct

SEQ ID NO: 81640 - DNA, 15 bp, Homo sapiens
ttcttcttcatgcta

SEQ ID NO: 81641 - DNA, 15 bp, Homo sapiens
tcttcttcatgctac

SEQ ID NO: 81642 - DNA, 15 bp, Homo sapiens
cttcttcatgctaca

SEQ ID NO: 81643 - DNA, 15 bp, Homo sapiens
ttcttcatgctacaa

SEQ ID NO: 81644 - DNA, 15 bp, Homo sapiens
tcttcatgctacaag

SEQ ID NO: 81645 - DNA, 15 bp, Homo sapiens
cttcatgctacaagt

SEQ ID NO: 81646 - DNA, 15 bp, Homo sapiens
ttcatgctacaagta

SEQ ID NO: 81647 - DNA, 15 bp, Homo sapiens
tcatgctacaagtat

SEQ ID NO: 81648 - DNA, 15 bp, Homo sapiens
catgctacaagtata

SEQ ID NO: 81649 - DNA, 15 bp, Homo sapiens
atgctacaagtatat

SEQ ID NO: 81650 - DNA, 15 bp, Homo sapiens
tgctacaagtatatt

SEQ ID NO: 81651 - DNA, 15 bp, Homo sapiens
gctacaagtatattt

SEQ ID NO: 81652 - DNA, 15 bp, Homo sapiens
ctacaagtatatttg

SEQ ID NO: 81653 - DNA, 15 bp, Homo sapiens
tacaagtatatttga

SEQ ID NO: 81654 - DNA, 15 bp, Homo sapiens
acaagtatatttgac

SEQ ID NO: 81655 - DNA, 15 bp, Homo sapiens
caagtatatttgact

SEQ ID NO: 81656 - DNA, 15 bp, Homo sapiens
aagtatatttgactc

SEQ ID NO: 81657 - DNA, 15 bp, Homo sapiens
agtatatttgactct

SEQ ID NO: 81658 - DNA, 15 bp, Homo sapiens
gtatatttgactctt

SEQ ID NO: 81659 - DNA, 15 bp, Homo sapiens
tatatttgactcttt

SEQ ID NO: 81660 - DNA, 15 bp, Homo sapiens
atatttgactctttc

SEQ ID NO: 81661 - DNA, 15 bp, Homo sapiens
tatttgactctttct

SEQ ID NO: 81662 - DNA, 15 bp, Homo sapiens
atttgactctttcta

SEQ ID NO: 81663 - DNA, 15 bp, Homo sapiens
tttgactctttctaa

SEQ ID NO: 81664 - DNA, 15 bp, Homo sapiens
ttgactctttctaag

SEQ ID NO: 81665 - DNA, 15 bp, Homo sapiens
tgactctttctaaga

SEQ ID NO: 81666 - DNA, 15 bp, Homo sapiens
gactctttctaagat

SEQ ID NO: 81667 - DNA, 15 bp, Homo sapiens
actctttctaagata

SEQ ID NO: 81668 - DNA, 15 bp, Homo sapiens
ctctttctaagatac

SEQ ID NO: 81669 - DNA, 15 bp, Homo sapiens
tctttctaagatact

SEQ ID NO: 81670 - DNA, 15 bp, Homo sapiens
ctttctaagatactt

SEQ ID NO: 81671 - DNA, 15 bp, Homo sapiens
tttctaagatacttg

SEQ ID NO: 81672 - DNA, 15 bp, Homo sapiens
ttctaagatacttgc

SEQ ID NO: 81673 - DNA, 15 bp, Homo sapiens
tctaagatacttgcc

SEQ ID NO: 81674 - DNA, 15 bp, Homo sapiens
ctaagatacttgcct

SEQ ID NO: 81675 - DNA, 15 bp, Homo sapiens
taagatacttgcctt

SEQ ID NO: 81676 - DNA, 15 bp, Homo sapiens
aagatacttgccttc

SEQ ID NO: 81677 - DNA, 15 bp, Homo sapiens
agatacttgccttca

SEQ ID NO: 81678 - DNA, 15 bp, Homo sapiens
gatacttgccttcac

SEQ ID NO: 81679 - DNA, 15 bp, Homo sapiens
atacttgccttcact

SEQ ID NO: 81680 - DNA, 15 bp, Homo sapiens
tacttgccttcactg

SEQ ID NO: 81681 - DNA, 15 bp, Homo sapiens
acttgccttcactgt

SEQ ID NO: 81682 - DNA, 15 bp, Homo sapiens
cttgccttcactgtt

SEQ ID NO: 81683 - DNA, 15 bp, Homo sapiens
ttgccttcactgttc

SEQ ID NO: 81684 - DNA, 15 bp, Homo sapiens
tgccttcactgttca

SEQ ID NO: 81685 - DNA, 15 bp, Homo sapiens
gccttcactgttcaa

SEQ ID NO: 81686 - DNA, 15 bp, Homo sapiens
ccttcactgttcaac

SEQ ID NO: 81687 - DNA, 15 bp, Homo sapiens
cttcactgttcaact

SEQ ID NO: 81688 - DNA, 15 bp, Homo sapiens
ttcactgttcaactg

SEQ ID NO: 81689 - DNA, 15 bp, Homo sapiens
tcactgttcaactgt

SEQ ID NO: 81690 - DNA, 15 bp, Homo sapiens
cactgttcaactgtg

SEQ ID NO: 81691 - DNA, 15 bp, Homo sapiens
actgttcaactgtgt

SEQ ID NO: 81692 - DNA, 15 bp, Homo sapiens
ctgttcaactgtgtg

SEQ ID NO: 81693 - DNA, 15 bp, Homo sapiens
tgttcaactgtgtga

SEQ ID NO: 81694 - DNA, 15 bp, Homo sapiens
gttcaactgtgtgac

SEQ ID NO: 81695 - DNA, 15 bp, Homo sapiens
ttcaactgtgtgact

SEQ ID NO: 81696 - DNA, 15 bp, Homo sapiens
tcaactgtgtgactt

SEQ ID NO: 81697 - DNA, 15 bp, Homo sapiens
caactgtgtgacttt

SEQ ID NO: 81698 - DNA, 15 bp, Homo sapiens
aactgtgtgactttt

SEQ ID NO: 81699 - DNA, 15 bp, Homo sapiens
actgtgtgacttttt

SEQ ID NO: 81700 - DNA, 15 bp, Homo sapiens
ctgtgtgactttttg

SEQ ID NO: 81701 - DNA, 15 bp, Homo sapiens
tgtgtgactttttgt

SEQ ID NO: 81702 - DNA, 15 bp, Homo sapiens
gtgtgactttttgtt

SEQ ID NO: 81703 - DNA, 15 bp, Homo sapiens
tgtgactttttgttt

SEQ ID NO: 81704 - DNA, 15 bp, Homo sapiens
gtgactttttgtttg

SEQ ID NO: 81705 - DNA, 15 bp, Homo sapiens
tgactttttgtttgt

SEQ ID NO: 81706 - DNA, 15 bp, Homo sapiens
gactttttgtttgtt

SEQ ID NO: 81707 - DNA, 15 bp, Homo sapiens
actttttgtttgttt

SEQ ID NO: 81708 - DNA, 15 bp, Homo sapiens
ctttttgtttgttta

SEQ ID NO: 81709 - DNA, 15 bp, Homo sapiens
tttttgtttgtttag

SEQ ID NO: 81710 - DNA, 15 bp, Homo sapiens
ttttgtttgtttagc

SEQ ID NO: 81711 - DNA, 15 bp, Homo sapiens
tttgtttgtttagca

SEQ ID NO: 81712 - DNA, 15 bp, Homo sapiens
ttgtttgtttagcat

SEQ ID NO: 81713 - DNA, 15 bp, Homo sapiens
tgtttgtttagcatt

SEQ ID NO: 81714 - DNA, 15 bp, Homo sapiens
gtttgtttagcatta

SEQ ID NO: 81715 - DNA, 15 bp, Homo sapiens
tttgtttagcattac

SEQ ID NO: 81716 - DNA, 15 bp, Homo sapiens
ttgtttagcattaca

SEQ ID NO: 81717 - DNA, 15 bp, Homo sapiens
tgtttagcattacaa

SEQ ID NO: 81718 - DNA, 15 bp, Homo sapiens
gtttagcattacaat

SEQ ID NO: 81719 - DNA, 15 bp, Homo sapiens
tttagcattacaatc

SEQ ID NO: 81720 - DNA, 15 bp, Homo sapiens
ttagcattacaatca

SEQ ID NO: 81721 - DNA, 15 bp, Homo sapiens
tagcattacaatcaa

SEQ ID NO: 81722 - DNA, 15 bp, Homo sapiens
agcattacaatcaat

SEQ ID NO: 81723 - DNA, 15 bp, Homo sapiens
gcattacaatcaata

SEQ ID NO: 81724 - DNA, 15 bp, Homo sapiens
cattacaatcaatat

SEQ ID NO: 81725 - DNA, 15 bp, Homo sapiens
attacaatcaatatc

SEQ ID NO: 81726 - DNA, 15 bp, Homo sapiens
ttacaatcaatatcc

SEQ ID NO: 81727 - DNA, 15 bp, Homo sapiens
tacaatcaatatcct

SEQ ID NO: 81728 - DNA, 15 bp, Homo sapiens
acaatcaatatccta

SEQ ID NO: 81729 - DNA, 15 bp, Homo sapiens
caatcaatatcctag

SEQ ID NO: 81730 - DNA, 15 bp, Homo sapiens
aatcaatatcctagt

SEQ ID NO: 81731 - DNA, 15 bp, Homo sapiens
atcaatatcctagta

SEQ ID NO: 81732 - DNA, 15 bp, Homo sapiens
tcaatatcctagtag

SEQ ID NO: 81733 - DNA, 15 bp, Homo sapiens
caatatcctagtagg

SEQ ID NO: 81734 - DNA, 15 bp, Homo sapiens
aatatcctagtagga

SEQ ID NO: 81735 - DNA, 15 bp, Homo sapiens
atatcctagtaggat

SEQ ID NO: 81736 - DNA, 15 bp, Homo sapiens
tatcctagtaggatg

SEQ ID NO: 81737 - DNA, 15 bp, Homo sapiens
atcctagtaggatga

SEQ ID NO: 81738 - DNA, 15 bp, Homo sapiens
tcctagtaggatgat

SEQ ID NO: 81739 - DNA, 15 bp, Homo sapiens
cctagtaggatgatt

SEQ ID NO: 81740 - DNA, 15 bp, Homo sapiens
ctagtaggatgattt

SEQ ID NO: 81741 - DNA, 15 bp, Homo sapiens
tagtaggatgattta

SEQ ID NO: 81742 - DNA, 15 bp, Homo sapiens
agtaggatgatttaa

SEQ ID NO: 81743 - DNA, 15 bp, Homo sapiens
gtaggatgatttaat

SEQ ID NO: 81744 - DNA, 15 bp, Homo sapiens
taggatgatttaatc

SEQ ID NO: 81745 - DNA, 15 bp, Homo sapiens
aggatgatttaatca

SEQ ID NO: 81746 - DNA, 15 bp, Homo sapiens
ggatgatttaatcaa

SEQ ID NO: 81747 - DNA, 15 bp, Homo sapiens
gatgatttaatcaat

SEQ ID NO: 81748 - DNA, 15 bp, Homo sapiens
atgatttaatcaatg

SEQ ID NO: 81749 - DNA, 15 bp, Homo sapiens
tgatttaatcaatga

SEQ ID NO: 81750 - DNA, 15 bp, Homo sapiens
gatttaatcaatgat

SEQ ID NO: 81751 - DNA, 15 bp, Homo sapiens
atttaatcaatgatt

SEQ ID NO: 81752 - DNA, 15 bp, Homo sapiens
tttaatcaatgattt

SEQ ID NO: 81753 - DNA, 15 bp, Homo sapiens
ttaatcaatgatttt

SEQ ID NO: 81754 - DNA, 15 bp, Homo sapiens
taatcaatgattttt

SEQ ID NO: 81755 - DNA, 15 bp, Homo sapiens
aatcaatgattttta

SEQ ID NO: 81756 - DNA, 15 bp, Homo sapiens
atcaatgatttttaa

SEQ ID NO: 81757 - DNA, 15 bp, Homo sapiens
tcaatgatttttaat

SEQ ID NO: 81758 - DNA, 15 bp, Homo sapiens
caatgatttttaatt

SEQ ID NO: 81759 - DNA, 15 bp, Homo sapiens
aatgatttttaattg

SEQ ID NO: 81760 - DNA, 15 bp, Homo sapiens
atgatttttaattgg

SEQ ID NO: 81761 - DNA, 15 bp, Homo sapiens
tgatttttaattgga

SEQ ID NO: 81762 - DNA, 15 bp, Homo sapiens
gatttttaattggaa

SEQ ID NO: 81763 - DNA, 15 bp, Homo sapiens
atttttaattggaac

SEQ ID NO: 81764 - DNA, 15 bp, Homo sapiens
tttttaattggaaca

SEQ ID NO: 81765 - DNA, 15 bp, Homo sapiens
ttttaattggaacaa

SEQ ID NO: 81766 - DNA, 15 bp, Homo sapiens
tttaattggaacaaa

SEQ ID NO: 81767 - DNA, 15 bp, Homo sapiens
ttaattggaacaaat

SEQ ID NO: 81768 - DNA, 15 bp, Homo sapiens
taattggaacaaata

SEQ ID NO: 81769 - DNA, 15 bp, Homo sapiens
aattggaacaaatag

SEQ ID NO: 81770 - DNA, 15 bp, Homo sapiens
attggaacaaatagt

SEQ ID NO: 81771 - DNA, 15 bp, Homo sapiens
ttggaacaaatagtt

SEQ ID NO: 81772 - DNA, 15 bp, Homo sapiens
tggaacaaatagttt

SEQ ID NO: 81773 - DNA, 15 bp, Homo sapiens
ggaacaaatagtttt

SEQ ID NO: 81774 - DNA, 15 bp, Homo sapiens
gaacaaatagttttt

SEQ ID NO: 81775 - DNA, 15 bp, Homo sapiens
aacaaatagtttttg

SEQ ID NO: 81776 - DNA, 15 bp, Homo sapiens
acaaatagtttttgt

SEQ ID NO: 81777 - DNA, 15 bp, Homo sapiens
caaatagtttttgta

SEQ ID NO: 81778 - DNA, 15 bp, Homo sapiens
aaatagtttttgtaa

SEQ ID NO: 81779 - DNA, 15 bp, Homo sapiens
aatagtttttgtaat

SEQ ID NO: 81780 - DNA, 15 bp, Homo sapiens
atagtttttgtaatg

SEQ ID NO: 81781 - DNA, 15 bp, Homo sapiens
tagtttttgtaatgg

SEQ ID NO: 81782 - DNA, 15 bp, Homo sapiens
agtttttgtaatggt

SEQ ID NO: 81783 - DNA, 15 bp, Homo sapiens
gtttttgtaatggtc

SEQ ID NO: 81784 - DNA, 15 bp, Homo sapiens
tttttgtaatggtct

SEQ ID NO: 81785 - DNA, 15 bp, Homo sapiens
ttttgtaatggtcta

SEQ ID NO: 81786 - DNA, 15 bp, Homo sapiens
tttgtaatggtctag

SEQ ID NO: 81787 - DNA, 15 bp, Homo sapiens
ttgtaatggtctagg

SEQ ID NO: 81788 - DNA, 15 bp, Homo sapiens
tgtaatggtctaggc

SEQ ID NO: 81789 - DNA, 15 bp, Homo sapiens
gtaatggtctaggct

SEQ ID NO: 81790 - DNA, 15 bp, Homo sapiens
taatggtctaggctt

SEQ ID NO: 81791 - DNA, 15 bp, Homo sapiens
aatggtctaggcttt

SEQ ID NO: 81792 - DNA, 15 bp, Homo sapiens
atggtctaggctttt

SEQ ID NO: 81793 - DNA, 15 bp, Homo sapiens
tggtctaggcttttc

SEQ ID NO: 81794 - DNA, 15 bp, Homo sapiens
ggtctaggcttttcc

SEQ ID NO: 81795 - DNA, 15 bp, Homo sapiens
gtctaggcttttcca

SEQ ID NO: 81796 - DNA, 15 bp, Homo sapiens
tctaggcttttccaa

SEQ ID NO: 81797 - DNA, 15 bp, Homo sapiens
ctaggcttttccaac

SEQ ID NO: 81798 - DNA, 15 bp, Homo sapiens
taggcttttccaact

SEQ ID NO: 81799 - DNA, 15 bp, Homo sapiens
aggcttttccaactt

SEQ ID NO: 81800 - DNA, 15 bp, Homo sapiens
ggcttttccaactta

SEQ ID NO: 81801 - DNA, 15 bp, Homo sapiens
gcttttccaacttaa

SEQ ID NO: 81802 - DNA, 15 bp, Homo sapiens
cttttccaacttaac

SEQ ID NO: 81803 - DNA, 15 bp, Homo sapiens
ttttccaacttaact

SEQ ID NO: 81804 - DNA, 15 bp, Homo sapiens
tttccaacttaactg

SEQ ID NO: 81805 - DNA, 15 bp, Homo sapiens
ttccaacttaactgt

SEQ ID NO: 81806 - DNA, 15 bp, Homo sapiens
tccaacttaactgtg

SEQ ID NO: 81807 - DNA, 15 bp, Homo sapiens
ccaacttaactgtgc

SEQ ID NO: 81808 - DNA, 15 bp, Homo sapiens
caacttaactgtgct

SEQ ID NO: 81809 - DNA, 15 bp, Homo sapiens
aacttaactgtgctc

SEQ ID NO: 81810 - DNA, 15 bp, Homo sapiens
acttaactgtgctct

SEQ ID NO: 81811 - DNA, 15 bp, Homo sapiens
cttaactgtgctctc

SEQ ID NO: 81812 - DNA, 15 bp, Homo sapiens
ttaactgtgctctca

SEQ ID NO: 81813 - DNA, 15 bp, Homo sapiens
taactgtgctctcac

SEQ ID NO: 81814 - DNA, 15 bp, Homo sapiens
aactgtgctctcaca

SEQ ID NO: 81815 - DNA, 15 bp, Homo sapiens
actgtgctctcacat

SEQ ID NO: 81816 - DNA, 15 bp, Homo sapiens
ctgtgctctcacatg

SEQ ID NO: 81817 - DNA, 15 bp, Homo sapiens
tgtgctctcacatgt

SEQ ID NO: 81818 - DNA, 15 bp, Homo sapiens
gtgctctcacatgtg

SEQ ID NO: 81819 - DNA, 15 bp, Homo sapiens
tgctctcacatgtgg

SEQ ID NO: 81820 - DNA, 15 bp, Homo sapiens
gctctcacatgtggt

SEQ ID NO: 81821 - DNA, 15 bp, Homo sapiens
ctctcacatgtggtc

SEQ ID NO: 81822 - DNA, 15 bp, Homo sapiens
tctcacatgtggtct

SEQ ID NO: 81823 - DNA, 15 bp, Homo sapiens
ctcacatgtggtctc

SEQ ID NO: 81824 - DNA, 15 bp, Homo sapiens
tcacatgtggtctct

SEQ ID NO: 81825 - DNA, 15 bp, Homo sapiens
cacatgtggtctctt

SEQ ID NO: 81826 - DNA, 15 bp, Homo sapiens
acatgtggtctcttt

SEQ ID NO: 81827 - DNA, 15 bp, Homo sapiens
catgtggtctctttt

SEQ ID NO: 81828 - DNA, 15 bp, Homo sapiens
atgtggtctcttttt

SEQ ID NO: 81829 - DNA, 15 bp, Homo sapiens
tgtggtctctttttc

SEQ ID NO: 81830 - DNA, 15 bp, Homo sapiens
gtggtctctttttct

SEQ ID NO: 81831 - DNA, 15 bp, Homo sapiens
tggtctctttttctc

SEQ ID NO: 81832 - DNA, 15 bp, Homo sapiens
ggtctctttttctcc

SEQ ID NO: 81833 - DNA, 15 bp, Homo sapiens
gtctctttttctccc

SEQ ID NO: 81834 - DNA, 15 bp, Homo sapiens
tctctttttctccct

SEQ ID NO: 81835 - DNA, 15 bp, Homo sapiens
ctctttttctccctc

SEQ ID NO: 81836 - DNA, 15 bp, Homo sapiens
tctttttctccctct

SEQ ID NO: 81837 - DNA, 15 bp, Homo sapiens
ctttttctccctctt

SEQ ID NO: 81838 - DNA, 15 bp, Homo sapiens
tttttctccctcttt

SEQ ID NO: 81839 - DNA, 15 bp, Homo sapiens
ttttctccctctttc

SEQ ID NO: 81840 - DNA, 15 bp, Homo sapiens
tttctccctctttcc

SEQ ID NO: 81841 - DNA, 15 bp, Homo sapiens
ttctccctctttcct

SEQ ID NO: 81842 - DNA, 15 bp, Homo sapiens
tctccctctttcctc

SEQ ID NO: 81843 - DNA, 15 bp, Homo sapiens
ctccctctttcctcc

SEQ ID NO: 81844 - DNA, 15 bp, Homo sapiens
tccctctttcctcct

SEQ ID NO: 81845 - DNA, 15 bp, Homo sapiens
ccctctttcctcctt

SEQ ID NO: 81846 - DNA, 15 bp, Homo sapiens
cctctttcctccttc

SEQ ID NO: 81847 - DNA, 15 bp, Homo sapiens
ctctttcctccttct

SEQ ID NO: 81848 - DNA, 15 bp, Homo sapiens
tctttcctccttctt

SEQ ID NO: 81849 - DNA, 15 bp, Homo sapiens
ctttcctccttctta

SEQ ID NO: 81850 - DNA, 15 bp, Homo sapiens
tttcctccttcttat

SEQ ID NO: 81851 - DNA, 15 bp, Homo sapiens
ttcctccttcttata

SEQ ID NO: 81852 - DNA, 15 bp, Homo sapiens
tcctccttcttatac

SEQ ID NO: 81853 - DNA, 15 bp, Homo sapiens
cctccttcttataca

SEQ ID NO: 81854 - DNA, 15 bp, Homo sapiens
ctccttcttatacac

SEQ ID NO: 81855 - DNA, 15 bp, Homo sapiens
tccttcttatacact

SEQ ID NO: 81856 - DNA, 15 bp, Homo sapiens
ccttcttatacactc

SEQ ID NO: 81857 - DNA, 15 bp, Homo sapiens
cttcttatacactct

SEQ ID NO: 81858 - DNA, 15 bp, Homo sapiens
ttcttatacactctc

SEQ ID NO: 81859 - DNA, 15 bp, Homo sapiens
tcttatacactctca

SEQ ID NO: 81860 - DNA, 15 bp, Homo sapiens
cttatacactctcac

SEQ ID NO: 81861 - DNA, 15 bp, Homo sapiens
ttatacactctcacc

SEQ ID NO: 81862 - DNA, 15 bp, Homo sapiens
tatacactctcaccc

SEQ ID NO: 81863 - DNA, 15 bp, Homo sapiens
atacactctcaccca

SEQ ID NO: 81864 - DNA, 15 bp, Homo sapiens
tacactctcacccac

SEQ ID NO: 81865 - DNA, 15 bp, Homo sapiens
acactctcacccaca

SEQ ID NO: 81866 - DNA, 15 bp, Homo sapiens
cactctcacccacac

SEQ ID NO: 81867 - DNA, 15 bp, Homo sapiens
actctcacccacaca

SEQ ID NO: 81868 - DNA, 15 bp, Homo sapiens
ctctcacccacacac

SEQ ID NO: 81869 - DNA, 15 bp, Homo sapiens
tctcacccacacaca

SEQ ID NO: 81870 - DNA, 15 bp, Homo sapiens
ctcacccacacacat

SEQ ID NO: 81871 - DNA, 15 bp, Homo sapiens
tcacccacacacata

SEQ ID NO: 81872 - DNA, 15 bp, Homo sapiens
cacccacacacatat

SEQ ID NO: 81873 - DNA, 15 bp, Homo sapiens
acccacacacatatg

SEQ ID NO: 81874 - DNA, 15 bp, Homo sapiens
cccacacacatatgc

SEQ ID NO: 81875 - DNA, 15 bp, Homo sapiens
ccacacacatatgca

SEQ ID NO: 81876 - DNA, 15 bp, Homo sapiens
cacacacatatgcat

SEQ ID NO: 81877 - DNA, 15 bp, Homo sapiens
acacacatatgcata

SEQ ID NO: 81878 - DNA, 15 bp, Homo sapiens
cacacatatgcatac

SEQ ID NO: 81879 - DNA, 15 bp, Homo sapiens
acacatatgcataca

SEQ ID NO: 81880 - DNA, 15 bp, Homo sapiens
cacatatgcatacat

SEQ ID NO: 81881 - DNA, 15 bp, Homo sapiens
acatatgcatacata

SEQ ID NO: 81882 - DNA, 15 bp, Homo sapiens
catatgcatacatac

SEQ ID NO: 81883 - DNA, 15 bp, Homo sapiens
atatgcatacatacc

SEQ ID NO: 81884 - DNA, 15 bp, Homo sapiens
tatgcatacataccc

SEQ ID NO: 81885 - DNA, 15 bp, Homo sapiens
atgcatacataccct

SEQ ID NO: 81886 - DNA, 15 bp, Homo sapiens
tgcatacataccctg

SEQ ID NO: 81887 - DNA, 15 bp, Homo sapiens
gcatacataccctgt

SEQ ID NO: 81888 - DNA, 15 bp, Homo sapiens
catacataccctgtc

SEQ ID NO: 81889 - DNA, 15 bp, Homo sapiens
atacataccctgtct

SEQ ID NO: 81890 - DNA, 15 bp, Homo sapiens
tacataccctgtctg

SEQ ID NO: 81891 - DNA, 15 bp, Homo sapiens
acataccctgtctga

SEQ ID NO: 81892 - DNA, 15 bp, Homo sapiens
cataccctgtctgat

SEQ ID NO: 81893 - DNA, 15 bp, Homo sapiens
ataccctgtctgatg

SEQ ID NO: 81894 - DNA, 15 bp, Homo sapiens
taccctgtctgatgt

SEQ ID NO: 81895 - DNA, 15 bp, Homo sapiens
accctgtctgatgta

SEQ ID NO: 81896 - DNA, 15 bp, Homo sapiens
ccctgtctgatgtat

SEQ ID NO: 81897 - DNA, 15 bp, Homo sapiens
cctgtctgatgtatc

SEQ ID NO: 81898 - DNA, 15 bp, Homo sapiens
ctgtctgatgtatct

SEQ ID NO: 81899 - DNA, 15 bp, Homo sapiens
tgtctgatgtatctg

SEQ ID NO: 81900 - DNA, 15 bp, Homo sapiens
gtctgatgtatctgc

SEQ ID NO: 81901 - DNA, 15 bp, Homo sapiens
tctgatgtatctgct

SEQ ID NO: 81902 - DNA, 15 bp, Homo sapiens
ctgatgtatctgctt

SEQ ID NO: 81903 - DNA, 15 bp, Homo sapiens
tgatgtatctgcttc

SEQ ID NO: 81904 - DNA, 15 bp, Homo sapiens
gatgtatctgcttct

SEQ ID NO: 81905 - DNA, 15 bp, Homo sapiens
atgtatctgcttctt

SEQ ID NO: 81906 - DNA, 15 bp, Homo sapiens
tgtatctgcttcttc

SEQ ID NO: 81907 - DNA, 15 bp, Homo sapiens
gtatctgcttcttca

SEQ ID NO: 81908 - DNA, 15 bp, Homo sapiens
tatctgcttcttcag

SEQ ID NO: 81909 - DNA, 15 bp, Homo sapiens
atctgcttcttcaga

SEQ ID NO: 81910 - DNA, 15 bp, Homo sapiens
tctgcttcttcagaa

SEQ ID NO: 81911 - DNA, 15 bp, Homo sapiens
ctgcttcttcagaat

SEQ ID NO: 81912 - DNA, 15 bp, Homo sapiens
tgcttcttcagaata

SEQ ID NO: 81913 - DNA, 15 bp, Homo sapiens
gcttcttcagaatag

SEQ ID NO: 81914 - DNA, 15 bp, Homo sapiens
cttcttcagaatagt

SEQ ID NO: 81915 - DNA, 15 bp, Homo sapiens
ttcttcagaatagtt

SEQ ID NO: 81916 - DNA, 15 bp, Homo sapiens
tcttcagaatagttg

SEQ ID NO: 81917 - DNA, 15 bp, Homo sapiens
cttcagaatagttgg

SEQ ID NO: 81918 - DNA, 15 bp, Homo sapiens
ttcagaatagttggc

SEQ ID NO: 81919 - DNA, 15 bp, Homo sapiens
tcagaatagttggct

SEQ ID NO: 81920 - DNA, 15 bp, Homo sapiens
cagaatagttggctg

SEQ ID NO: 81921 - DNA, 15 bp, Homo sapiens
agaatagttggctgt

SEQ ID NO: 81922 - DNA, 15 bp, Homo sapiens
gaatagttggctgtg

SEQ ID NO: 81923 - DNA, 15 bp, Homo sapiens
aatagttggctgtgc

SEQ ID NO: 81924 - DNA, 15 bp, Homo sapiens
atagttggctgtgct

SEQ ID NO: 81925 - DNA, 15 bp, Homo sapiens
tagttggctgtgctc

SEQ ID NO: 81926 - DNA, 15 bp, Homo sapiens
agttggctgtgctct

SEQ ID NO: 81927 - DNA, 15 bp, Homo sapiens
gttggctgtgctctg

SEQ ID NO: 81928 - DNA, 15 bp, Homo sapiens
ttggctgtgctctgc

SEQ ID NO: 81929 - DNA, 15 bp, Homo sapiens
tggctgtgctctgct

SEQ ID NO: 81930 - DNA, 15 bp, Homo sapiens
ggctgtgctctgctg

SEQ ID NO: 81931 - DNA, 15 bp, Homo sapiens
gctgtgctctgctga

SEQ ID NO: 81932 - DNA, 15 bp, Homo sapiens
ctgtgctctgctgat

SEQ ID NO: 81933 - DNA, 15 bp, Homo sapiens
tgtgctctgctgatg

SEQ ID NO: 81934 - DNA, 15 bp, Homo sapiens
gtgctctgctgatga

SEQ ID NO: 81935 - DNA, 15 bp, Homo sapiens
tgctctgctgatgat

SEQ ID NO: 81936 - DNA, 15 bp, Homo sapiens
gctctgctgatgatg

SEQ ID NO: 81937 - DNA, 15 bp, Homo sapiens
ctctgctgatgatga

SEQ ID NO: 81938 - DNA, 15 bp, Homo sapiens
tctgctgatgatgag

SEQ ID NO: 81939 - DNA, 15 bp, Homo sapiens
ctgctgatgatgaga

SEQ ID NO: 81940 - DNA, 15 bp, Homo sapiens
tgctgatgatgagaa

SEQ ID NO: 81941 - DNA, 15 bp, Homo sapiens
gctgatgatgagaac

SEQ ID NO: 81942 - DNA, 15 bp, Homo sapiens
ctgatgatgagaact

SEQ ID NO: 81943 - DNA, 15 bp, Homo sapiens
tgatgatgagaactt

SEQ ID NO: 81944 - DNA, 15 bp, Homo sapiens
gatgatgagaacttg

SEQ ID NO: 81945 - DNA, 15 bp, Homo sapiens
atgatgagaacttgc

SEQ ID NO: 81946 - DNA, 15 bp, Homo sapiens
tgatgagaacttgcc

SEQ ID NO: 81947 - DNA, 15 bp, Homo sapiens
gatgagaacttgcca

SEQ ID NO: 81948 - DNA, 15 bp, Homo sapiens
atgagaacttgccat

SEQ ID NO: 81949 - DNA, 15 bp, Homo sapiens
tgagaacttgccatt

SEQ ID NO: 81950 - DNA, 15 bp, Homo sapiens
gagaacttgccattt

SEQ ID NO: 81951 - DNA, 15 bp, Homo sapiens
agaacttgccattta

SEQ ID NO: 81952 - DNA, 15 bp, Homo sapiens
gaacttgccatttaa

SEQ ID NO: 81953 - DNA, 15 bp, Homo sapiens
aacttgccatttaag

SEQ ID NO: 81954 - DNA, 15 bp, Homo sapiens
acttgccatttaaga

SEQ ID NO: 81955 - DNA, 15 bp, Homo sapiens
cttgccatttaagaa

SEQ ID NO: 81956 - DNA, 15 bp, Homo sapiens
ttgccatttaagaag

SEQ ID NO: 81957 - DNA, 15 bp, Homo sapiens
tgccatttaagaagg

SEQ ID NO: 81958 - DNA, 15 bp, Homo sapiens
gccatttaagaagga

SEQ ID NO: 81959 - DNA, 15 bp, Homo sapiens
ccatttaagaaggac

SEQ ID NO: 81960 - DNA, 15 bp, Homo sapiens
catttaagaaggact

SEQ ID NO: 81961 - DNA, 15 bp, Homo sapiens
atttaagaaggactt

SEQ ID NO: 81962 - DNA, 15 bp, Homo sapiens
tttaagaaggacttg

SEQ ID NO: 81963 - DNA, 15 bp, Homo sapiens
ttaagaaggacttgg

SEQ ID NO: 81964 - DNA, 15 bp, Homo sapiens
taagaaggacttggg

SEQ ID NO: 81965 - DNA, 15 bp, Homo sapiens
aagaaggacttggga

SEQ ID NO: 81966 - DNA, 15 bp, Homo sapiens
agaaggacttgggat

SEQ ID NO: 81967 - DNA, 15 bp, Homo sapiens
gaaggacttgggata

SEQ ID NO: 81968 - DNA, 15 bp, Homo sapiens
aaggacttgggatag

SEQ ID NO: 81969 - DNA, 15 bp, Homo sapiens
aggacttgggatagt

SEQ ID NO: 81970 - DNA, 15 bp, Homo sapiens
ggacttgggatagtc

SEQ ID NO: 81971 - DNA, 15 bp, Homo sapiens
gacttgggatagtcc

SEQ ID NO: 81972 - DNA, 15 bp, Homo sapiens
acttgggatagtcca

SEQ ID NO: 81973 - DNA, 15 bp, Homo sapiens
cttgggatagtccat

SEQ ID NO: 81974 - DNA, 15 bp, Homo sapiens
ttgggatagtccatg

SEQ ID NO: 81975 - DNA, 15 bp, Homo sapiens
tgggatagtccatgt

SEQ ID NO: 81976 - DNA, 15 bp, Homo sapiens
gggatagtccatgtc

SEQ ID NO: 81977 - DNA, 15 bp, Homo sapiens
ggatagtccatgtca

SEQ ID NO: 81978 - DNA, 15 bp, Homo sapiens
gatagtccatgtcat

SEQ ID NO: 81979 - DNA, 15 bp, Homo sapiens
atagtccatgtcatc

SEQ ID NO: 81980 - DNA, 15 bp, Homo sapiens
tagtccatgtcatca

SEQ ID NO: 81981 - DNA, 15 bp, Homo sapiens
agtccatgtcatcat

SEQ ID NO: 81982 - DNA, 15 bp, Homo sapiens
gtccatgtcatcatg

SEQ ID NO: 81983 - DNA, 15 bp, Homo sapiens
tccatgtcatcatgt

SEQ ID NO: 81984 - DNA, 15 bp, Homo sapiens
ccatgtcatcatgtt

SEQ ID NO: 81985 - DNA, 15 bp, Homo sapiens
catgtcatcatgttc

SEQ ID NO: 81986 - DNA, 15 bp, Homo sapiens
atgtcatcatgttca

SEQ ID NO: 81987 - DNA, 15 bp, Homo sapiens
tgtcatcatgttcag

SEQ ID NO: 81988 - DNA, 15 bp, Homo sapiens
gtcatcatgttcagg

SEQ ID NO: 81989 - DNA, 15 bp, Homo sapiens
tcatcatgttcaggg

SEQ ID NO: 81990 - DNA, 15 bp, Homo sapiens
catcatgttcaggga

SEQ ID NO: 81991 - DNA, 15 bp, Homo sapiens
atcatgttcagggat

SEQ ID NO: 81992 - DNA, 15 bp, Homo sapiens
tcatgttcagggata

SEQ ID NO: 81993 - DNA, 15 bp, Homo sapiens
catgttcagggataa

SEQ ID NO: 81994 - DNA, 15 bp, Homo sapiens
atgttcagggataaa

SEQ ID NO: 81995 - DNA, 15 bp, Homo sapiens
tgttcagggataaaa

SEQ ID NO: 81996 - DNA, 15 bp, Homo sapiens
gttcagggataaaag

SEQ ID NO: 81997 - DNA, 15 bp, Homo sapiens
ttcagggataaaagt

SEQ ID NO: 81998 - DNA, 15 bp, Homo sapiens
tcagggataaaagta

SEQ ID NO: 81999 - DNA, 15 bp, Homo sapiens
cagggataaaagtaa

SEQ ID NO: 82000 - DNA, 15 bp, Homo sapiens
agggataaaagtaaa

SEQ ID NO: 82001 - DNA, 15 bp, Homo sapiens
gggataaaagtaaaa

SEQ ID NO: 82002 - DNA, 15 bp, Homo sapiens
ggataaaagtaaaac

SEQ ID NO: 82003 - DNA, 15 bp, Homo sapiens
gataaaagtaaaacc

SEQ ID NO: 82004 - DNA, 15 bp, Homo sapiens
ataaaagtaaaaccc

SEQ ID NO: 82005 - DNA, 15 bp, Homo sapiens
taaaagtaaaaccca

SEQ ID NO: 82006 - DNA, 15 bp, Homo sapiens
aaaagtaaaacccaa

SEQ ID NO: 82007 - DNA, 15 bp, Homo sapiens
aaagtaaaacccaag

SEQ ID NO: 82008 - DNA, 15 bp, Homo sapiens
aagtaaaacccaagg

SEQ ID NO: 82009 - DNA, 15 bp, Homo sapiens
agtaaaacccaaggg

SEQ ID NO: 82010 - DNA, 15 bp, Homo sapiens
gtaaaacccaagggc

SEQ ID NO: 82011 - DNA, 15 bp, Homo sapiens
taaaacccaagggca

SEQ ID NO: 82012 - DNA, 15 bp, Homo sapiens
aaaacccaagggcat

SEQ ID NO: 82013 - DNA, 15 bp, Homo sapiens
aaacccaagggcatt

SEQ ID NO: 82014 - DNA, 15 bp, Homo sapiens
aacccaagggcattt

SEQ ID NO: 82015 - DNA, 15 bp, Homo sapiens
acccaagggcattta

SEQ ID NO: 82016 - DNA, 15 bp, Homo sapiens
cccaagggcatttaa

SEQ ID NO: 82017 - DNA, 15 bp, Homo sapiens
ccaagggcatttaaa

SEQ ID NO: 82018 - DNA, 15 bp, Homo sapiens
caagggcatttaaac

SEQ ID NO: 82019 - DNA, 15 bp, Homo sapiens
aagggcatttaaact

SEQ ID NO: 82020 - DNA, 15 bp, Homo sapiens
agggcatttaaactt

SEQ ID NO: 82021 - DNA, 15 bp, Homo sapiens
gggcatttaaacttt

SEQ ID NO: 82022 - DNA, 15 bp, Homo sapiens
ggcatttaaacttta

SEQ ID NO: 82023 - DNA, 15 bp, Homo sapiens
gcatttaaactttat

SEQ ID NO: 82024 - DNA, 15 bp, Homo sapiens
catttaaactttatt

SEQ ID NO: 82025 - DNA, 15 bp, Homo sapiens
atttaaactttattg

SEQ ID NO: 82026 - DNA, 15 bp, Homo sapiens
tttaaactttattgt

SEQ ID NO: 82027 - DNA, 15 bp, Homo sapiens
ttaaactttattgta

SEQ ID NO: 82028 - DNA, 15 bp, Homo sapiens
taaactttattgtat

SEQ ID NO: 82029 - DNA, 15 bp, Homo sapiens
aaactttattgtatt

SEQ ID NO: 82030 - DNA, 15 bp, Homo sapiens
aactttattgtattt

SEQ ID NO: 82031 - DNA, 15 bp, Homo sapiens
actttattgtatttt

SEQ ID NO: 82032 - DNA, 15 bp, Homo sapiens
ctttattgtatttta

SEQ ID NO: 82033 - DNA, 15 bp, Homo sapiens
tttattgtattttat

SEQ ID NO: 82034 - DNA, 15 bp, Homo sapiens
ttattgtattttatt

SEQ ID NO: 82035 - DNA, 15 bp, Homo sapiens
tattgtattttattt

SEQ ID NO: 82036 - DNA, 15 bp, Homo sapiens
attgtattttatttt

SEQ ID NO: 82037 - DNA, 15 bp, Homo sapiens
ttgtattttattttc

SEQ ID NO: 82038 - DNA, 15 bp, Homo sapiens
tgtattttattttct

SEQ ID NO: 82039 - DNA, 15 bp, Homo sapiens
gtattttattttctg

SEQ ID NO: 82040 - DNA, 15 bp, Homo sapiens
tattttattttctgt

SEQ ID NO: 82041 - DNA, 15 bp, Homo sapiens
attttattttctgtt

SEQ ID NO: 82042 - DNA, 15 bp, Homo sapiens
ttttattttctgttt

SEQ ID NO: 82043 - DNA, 15 bp, Homo sapiens
tttattttctgtttc

SEQ ID NO: 82044 - DNA, 15 bp, Homo sapiens
ttattttctgtttcc

SEQ ID NO: 82045 - DNA, 15 bp, Homo sapiens
tattttctgtttcca

SEQ ID NO: 82046 - DNA, 15 bp, Homo sapiens
attttctgtttccag

SEQ ID NO: 82047 - DNA, 15 bp, Homo sapiens
ttttctgtttccagt

SEQ ID NO: 82048 - DNA, 15 bp, Homo sapiens
tttctgtttccagtc

SEQ ID NO: 82049 - DNA, 15 bp, Homo sapiens
ttctgtttccagtcc

SEQ ID NO: 82050 - DNA, 15 bp, Homo sapiens
tctgtttccagtcca

SEQ ID NO: 82051 - DNA, 15 bp, Homo sapiens
ctgtttccagtccaa

SEQ ID NO: 82052 - DNA, 15 bp, Homo sapiens
tgtttccagtccaaa

SEQ ID NO: 82053 - DNA, 15 bp, Homo sapiens
gtttccagtccaaat

SEQ ID NO: 82054 - DNA, 15 bp, Homo sapiens
tttccagtccaaatt

SEQ ID NO: 82055 - DNA, 15 bp, Homo sapiens
ttccagtccaaatta

SEQ ID NO: 82056 - DNA, 15 bp, Homo sapiens
tccagtccaaattaa

SEQ ID NO: 82057 - DNA, 15 bp, Homo sapiens
ccagtccaaattaaa

SEQ ID NO: 82058 - DNA, 15 bp, Homo sapiens
cagtccaaattaaat

SEQ ID NO: 82059 - DNA, 15 bp, Homo sapiens
agtccaaattaaatc

SEQ ID NO: 82060 - DNA, 15 bp, Homo sapiens
gtccaaattaaatcc

SEQ ID NO: 82061 - DNA, 15 bp, Homo sapiens
tccaaattaaatcca

SEQ ID NO: 82062 - DNA, 15 bp, Homo sapiens
ccaaattaaatccaa

SEQ ID NO: 82063 - DNA, 15 bp, Homo sapiens
caaattaaatccaag

SEQ ID NO: 82064 - DNA, 15 bp, Homo sapiens
aaattaaatccaaga

SEQ ID NO: 82065 - DNA, 15 bp, Homo sapiens
aattaaatccaagag

SEQ ID NO: 82066 - DNA, 15 bp, Homo sapiens
attaaatccaagaga

SEQ ID NO: 82067 - DNA, 15 bp, Homo sapiens
ttaaatccaagagaa

SEQ ID NO: 82068 - DNA, 15 bp, Homo sapiens
taaatccaagagaag

SEQ ID NO: 82069 - DNA, 15 bp, Homo sapiens
aaatccaagagaagg

SEQ ID NO: 82070 - DNA, 15 bp, Homo sapiens
aatccaagagaaggc

SEQ ID NO: 82071 - DNA, 15 bp, Homo sapiens
atccaagagaaggct

SEQ ID NO: 82072 - DNA, 15 bp, Homo sapiens
tccaagagaaggctc

SEQ ID NO: 82073 - DNA, 15 bp, Homo sapiens
ccaagagaaggctcc

SEQ ID NO: 82074 - DNA, 15 bp, Homo sapiens
caagagaaggctcca

SEQ ID NO: 82075 - DNA, 15 bp, Homo sapiens
aagagaaggctccat

SEQ ID NO: 82076 - DNA, 15 bp, Homo sapiens
agagaaggctccata

SEQ ID NO: 82077 - DNA, 15 bp, Homo sapiens
gagaaggctccataa

SEQ ID NO: 82078 - DNA, 15 bp, Homo sapiens
agaaggctccataat

SEQ ID NO: 82079 - DNA, 15 bp, Homo sapiens
gaaggctccataatc

SEQ ID NO: 82080 - DNA, 15 bp, Homo sapiens
aaggctccataatca

SEQ ID NO: 82081 - DNA, 15 bp, Homo sapiens
aggctccataatcaa

SEQ ID NO: 82082 - DNA, 15 bp, Homo sapiens
ggctccataatcaaa

SEQ ID NO: 82083 - DNA, 15 bp, Homo sapiens
gctccataatcaaaa

SEQ ID NO: 82084 - DNA, 15 bp, Homo sapiens
ctccataatcaaaaa

SEQ ID NO: 82085 - DNA, 15 bp, Homo sapiens
tccataatcaaaaag

SEQ ID NO: 82086 - DNA, 15 bp, Homo sapiens
ccataatcaaaaagt

SEQ ID NO: 82087 - DNA, 15 bp, Homo sapiens
cataatcaaaaagta

SEQ ID NO: 82088 - DNA, 15 bp, Homo sapiens
ataatcaaaaagtaa

SEQ ID NO: 82089 - DNA, 15 bp, Homo sapiens
taatcaaaaagtaag

SEQ ID NO: 82090 - DNA, 15 bp, Homo sapiens
aatcaaaaagtaagg

SEQ ID NO: 82091 - DNA, 15 bp, Homo sapiens
atcaaaaagtaagga

SEQ ID NO: 82092 - DNA, 15 bp, Homo sapiens
tcaaaaagtaaggac

SEQ ID NO: 82093 - DNA, 15 bp, Homo sapiens
caaaaagtaaggaca

SEQ ID NO: 82094 - DNA, 15 bp, Homo sapiens
aaaaagtaaggacat

SEQ ID NO: 82095 - DNA, 15 bp, Homo sapiens
aaaagtaaggacata

SEQ ID NO: 82096 - DNA, 15 bp, Homo sapiens
aaagtaaggacatat

SEQ ID NO: 82097 - DNA, 15 bp, Homo sapiens
aagtaaggacatatt

SEQ ID NO: 82098 - DNA, 15 bp, Homo sapiens
agtaaggacatattt

SEQ ID NO: 82099 - DNA, 15 bp, Homo sapiens
gtaaggacatatttt

SEQ ID NO: 82100 - DNA, 15 bp, Homo sapiens
taaggacatatttta

SEQ ID NO: 82101 - DNA, 15 bp, Homo sapiens
aaggacatattttaa

SEQ ID NO: 82102 - DNA, 15 bp, Homo sapiens
aggacatattttaaa

SEQ ID NO: 82103 - DNA, 15 bp, Homo sapiens
ggacatattttaaat

SEQ ID NO: 82104 - DNA, 15 bp, Homo sapiens
gacatattttaaatt

SEQ ID NO: 82105 - DNA, 15 bp, Homo sapiens
acatattttaaattt

SEQ ID NO: 82106 - DNA, 15 bp, Homo sapiens
catattttaaatttg

SEQ ID NO: 82107 - DNA, 15 bp, Homo sapiens
atattttaaatttgc

SEQ ID NO: 82108 - DNA, 15 bp, Homo sapiens
tattttaaatttgcc

SEQ ID NO: 82109 - DNA, 15 bp, Homo sapiens
attttaaatttgcca

SEQ ID NO: 82110 - DNA, 15 bp, Homo sapiens
ttttaaatttgccaa

SEQ ID NO: 82111 - DNA, 15 bp, Homo sapiens
tttaaatttgccaat

SEQ ID NO: 82112 - DNA, 15 bp, Homo sapiens
ttaaatttgccaatg

SEQ ID NO: 82113 - DNA, 15 bp, Homo sapiens
taaatttgccaatgg

SEQ ID NO: 82114 - DNA, 15 bp, Homo sapiens
aaatttgccaatggg

SEQ ID NO: 82115 - DNA, 15 bp, Homo sapiens
aatttgccaatggga

SEQ ID NO: 82116 - DNA, 15 bp, Homo sapiens
atttgccaatgggaa

SEQ ID NO: 82117 - DNA, 15 bp, Homo sapiens
tttgccaatgggaag

SEQ ID NO: 82118 - DNA, 15 bp, Homo sapiens
ttgccaatgggaaga

SEQ ID NO: 82119 - DNA, 15 bp, Homo sapiens
tgccaatgggaagat

SEQ ID NO: 82120 - DNA, 15 bp, Homo sapiens
gccaatgggaagata

SEQ ID NO: 82121 - DNA, 15 bp, Homo sapiens
ccaatgggaagatat

SEQ ID NO: 82122 - DNA, 15 bp, Homo sapiens
caatgggaagatatt

SEQ ID NO: 82123 - DNA, 15 bp, Homo sapiens
aatgggaagatattc

SEQ ID NO: 82124 - DNA, 15 bp, Homo sapiens
atgggaagatattct

SEQ ID NO: 82125 - DNA, 15 bp, Homo sapiens
tgggaagatattcta

SEQ ID NO: 82126 - DNA, 15 bp, Homo sapiens
gggaagatattctag

SEQ ID NO: 82127 - DNA, 15 bp, Homo sapiens
ggaagatattctagt

SEQ ID NO: 82128 - DNA, 15 bp, Homo sapiens
gaagatattctagtc

SEQ ID NO: 82129 - DNA, 15 bp, Homo sapiens
aagatattctagtca

SEQ ID NO: 82130 - DNA, 15 bp, Homo sapiens
agatattctagtcat

SEQ ID NO: 82131 - DNA, 15 bp, Homo sapiens
gatattctagtcatt

SEQ ID NO: 82132 - DNA, 15 bp, Homo sapiens
atattctagtcatta

SEQ ID NO: 82133 - DNA, 15 bp, Homo sapiens
tattctagtcattac

SEQ ID NO: 82134 - DNA, 15 bp, Homo sapiens
attctagtcattaca

SEQ ID NO: 82135 - DNA, 15 bp, Homo sapiens
ttctagtcattacag

SEQ ID NO: 82136 - DNA, 15 bp, Homo sapiens
tctagtcattacagt

SEQ ID NO: 82137 - DNA, 15 bp, Homo sapiens
ctagtcattacagtc

SEQ ID NO: 82138 - DNA, 15 bp, Homo sapiens
tagtcattacagtct

SEQ ID NO: 82139 - DNA, 15 bp, Homo sapiens
agtcattacagtctg

SEQ ID NO: 82140 - DNA, 15 bp, Homo sapiens
gtcattacagtctgg

SEQ ID NO: 82141 - DNA, 15 bp, Homo sapiens
tcattacagtctggt

SEQ ID NO: 82142 - DNA, 15 bp, Homo sapiens
cattacagtctggta

SEQ ID NO: 82143 - DNA, 15 bp, Homo sapiens
attacagtctggtaa

SEQ ID NO: 82144 - DNA, 15 bp, Homo sapiens
ttacagtctggtaat

SEQ ID NO: 82145 - DNA, 15 bp, Homo sapiens
tacagtctggtaata

SEQ ID NO: 82146 - DNA, 15 bp, Homo sapiens
acagtctggtaatac

SEQ ID NO: 82147 - DNA, 15 bp, Homo sapiens
cagtctggtaatact

SEQ ID NO: 82148 - DNA, 15 bp, Homo sapiens
agtctggtaatacta

SEQ ID NO: 82149 - DNA, 15 bp, Homo sapiens
gtctggtaatactat

SEQ ID NO: 82150 - DNA, 15 bp, Homo sapiens
tctggtaatactatc

SEQ ID NO: 82151 - DNA, 15 bp, Homo sapiens
ctggtaatactatca

SEQ ID NO: 82152 - DNA, 15 bp, Homo sapiens
tggtaatactatcaa

SEQ ID NO: 82153 - DNA, 15 bp, Homo sapiens
ggtaatactatcaat

SEQ ID NO: 82154 - DNA, 15 bp, Homo sapiens
gtaatactatcaatt

SEQ ID NO: 82155 - DNA, 15 bp, Homo sapiens
taatactatcaattc

SEQ ID NO: 82156 - DNA, 15 bp, Homo sapiens
aatactatcaattct

SEQ ID NO: 82157 - DNA, 15 bp, Homo sapiens
atactatcaattctg

SEQ ID NO: 82158 - DNA, 15 bp, Homo sapiens
tactatcaattctgt

SEQ ID NO: 82159 - DNA, 15 bp, Homo sapiens
actatcaattctgtt

SEQ ID NO: 82160 - DNA, 15 bp, Homo sapiens
ctatcaattctgttt

SEQ ID NO: 82161 - DNA, 15 bp, Homo sapiens
tatcaattctgtttc

SEQ ID NO: 82162 - DNA, 15 bp, Homo sapiens
atcaattctgtttct

SEQ ID NO: 82163 - DNA, 15 bp, Homo sapiens
tcaattctgtttctc

SEQ ID NO: 82164 - DNA, 15 bp, Homo sapiens
caattctgtttctct

SEQ ID NO: 82165 - DNA, 15 bp, Homo sapiens
aattctgtttctctt

SEQ ID NO: 82166 - DNA, 15 bp, Homo sapiens
attctgtttctcttc

SEQ ID NO: 82167 - DNA, 15 bp, Homo sapiens
ttctgtttctcttca

SEQ ID NO: 82168 - DNA, 15 bp, Homo sapiens
tctgtttctcttcag

SEQ ID NO: 82169 - DNA, 15 bp, Homo sapiens
ctgtttctcttcaga

SEQ ID NO: 82170 - DNA, 15 bp, Homo sapiens
tgtttctcttcagag

SEQ ID NO: 82171 - DNA, 15 bp, Homo sapiens
gtttctcttcagagg

SEQ ID NO: 82172 - DNA, 15 bp, Homo sapiens
tttctcttcagaggt

SEQ ID NO: 82173 - DNA, 15 bp, Homo sapiens
ttctcttcagaggtg

SEQ ID NO: 82174 - DNA, 15 bp, Homo sapiens
tctcttcagaggtga

SEQ ID NO: 82175 - DNA, 15 bp, Homo sapiens
ctcttcagaggtgag

SEQ ID NO: 82176 - DNA, 15 bp, Homo sapiens
tcttcagaggtgagg

SEQ ID NO: 82177 - DNA, 15 bp, Homo sapiens
cttcagaggtgaggg

SEQ ID NO: 82178 - DNA, 15 bp, Homo sapiens
ttcagaggtgagggg

SEQ ID NO: 82179 - DNA, 15 bp, Homo sapiens
tcagaggtgagggga

SEQ ID NO: 82180 - DNA, 15 bp, Homo sapiens
cagaggtgaggggag

SEQ ID NO: 82181 - DNA, 15 bp, Homo sapiens
agaggtgaggggaga

SEQ ID NO: 82182 - DNA, 15 bp, Homo sapiens
gaggtgaggggagac

SEQ ID NO: 82183 - DNA, 15 bp, Homo sapiens
aggtgaggggagact

SEQ ID NO: 82184 - DNA, 15 bp, Homo sapiens
ggtgaggggagacta

SEQ ID NO: 82185 - DNA, 15 bp, Homo sapiens
gtgaggggagactat

SEQ ID NO: 82186 - DNA, 15 bp, Homo sapiens
tgaggggagactatt

SEQ ID NO: 82187 - DNA, 15 bp, Homo sapiens
gaggggagactattt

SEQ ID NO: 82188 - DNA, 15 bp, Homo sapiens
aggggagactatttg

SEQ ID NO: 82189 - DNA, 15 bp, Homo sapiens
ggggagactatttga

SEQ ID NO: 82190 - DNA, 15 bp, Homo sapiens
gggagactatttgat

SEQ ID NO: 82191 - DNA, 15 bp, Homo sapiens
ggagactatttgatg

SEQ ID NO: 82192 - DNA, 15 bp, Homo sapiens
gagactatttgatga

SEQ ID NO: 82193 - DNA, 15 bp, Homo sapiens
agactatttgatgaa

SEQ ID NO: 82194 - DNA, 15 bp, Homo sapiens
gactatttgatgaaa

SEQ ID NO: 82195 - DNA, 15 bp, Homo sapiens
actatttgatgaaat

SEQ ID NO: 82196 - DNA, 15 bp, Homo sapiens
ctatttgatgaaatc

SEQ ID NO: 82197 - DNA, 15 bp, Homo sapiens
tatttgatgaaatcg

SEQ ID NO: 82198 - DNA, 15 bp, Homo sapiens
atttgatgaaatcgt

SEQ ID NO: 82199 - DNA, 15 bp, Homo sapiens
tttgatgaaatcgta

SEQ ID NO: 82200 - DNA, 15 bp, Homo sapiens
ttgatgaaatcgtaa

SEQ ID NO: 82201 - DNA, 15 bp, Homo sapiens
tgatgaaatcgtaag

SEQ ID NO: 82202 - DNA, 15 bp, Homo sapiens
gatgaaatcgtaagt

SEQ ID NO: 82203 - DNA, 15 bp, Homo sapiens
atgaaatcgtaagtc

SEQ ID NO: 82204 - DNA, 15 bp, Homo sapiens
tgaaatcgtaagtcc

SEQ ID NO: 82205 - DNA, 15 bp, Homo sapiens
gaaatcgtaagtcct

SEQ ID NO: 82206 - DNA, 15 bp, Homo sapiens
aaatcgtaagtcctg

SEQ ID NO: 82207 - DNA, 15 bp, Homo sapiens
aatcgtaagtcctgt

SEQ ID NO: 82208 - DNA, 15 bp, Homo sapiens
atcgtaagtcctgta

SEQ ID NO: 82209 - DNA, 15 bp, Homo sapiens
tcgtaagtcctgtag

SEQ ID NO: 82210 - DNA, 15 bp, Homo sapiens
cgtaagtcctgtagg

SEQ ID NO: 82211 - DNA, 15 bp, Homo sapiens
gtaagtcctgtaggg

SEQ ID NO: 82212 - DNA, 15 bp, Homo sapiens
taagtcctgtagggt

SEQ ID NO: 82213 - DNA, 15 bp, Homo sapiens
aagtcctgtagggtg

SEQ ID NO: 82214 - DNA, 15 bp, Homo sapiens
agtcctgtagggtgt

SEQ ID NO: 82215 - DNA, 15 bp, Homo sapiens
gtcctgtagggtgtt

SEQ ID NO: 82216 - DNA, 15 bp, Homo sapiens
tcctgtagggtgttg

SEQ ID NO: 82217 - DNA, 15 bp, Homo sapiens
cctgtagggtgttgt

SEQ ID NO: 82218 - DNA, 15 bp, Homo sapiens
ctgtagggtgttgtg

SEQ ID NO: 82219 - DNA, 15 bp, Homo sapiens
tgtagggtgttgtga

SEQ ID NO: 82220 - DNA, 15 bp, Homo sapiens
gtagggtgttgtgaa

SEQ ID NO: 82221 - DNA, 15 bp, Homo sapiens
tagggtgttgtgaaa

SEQ ID NO: 82222 - DNA, 15 bp, Homo sapiens
agggtgttgtgaaat

SEQ ID NO: 82223 - DNA, 15 bp, Homo sapiens
gggtgttgtgaaata

SEQ ID NO: 82224 - DNA, 15 bp, Homo sapiens
ggtgttgtgaaatag

SEQ ID NO: 82225 - DNA, 15 bp, Homo sapiens
gtgttgtgaaatagg

SEQ ID NO: 82226 - DNA, 15 bp, Homo sapiens
tgttgtgaaataggg

SEQ ID NO: 82227 - DNA, 15 bp, Homo sapiens
gttgtgaaatagggc

SEQ ID NO: 82228 - DNA, 15 bp, Homo sapiens
ttgtgaaatagggcc

SEQ ID NO: 82229 - DNA, 15 bp, Homo sapiens
tgtgaaatagggcca

SEQ ID NO: 82230 - DNA, 15 bp, Homo sapiens
gtgaaatagggccag

SEQ ID NO: 82231 - DNA, 15 bp, Homo sapiens
tgaaatagggccaga

SEQ ID NO: 82232 - DNA, 15 bp, Homo sapiens
gaaatagggccagaa

SEQ ID NO: 82233 - DNA, 15 bp, Homo sapiens
aaatagggccagaat

SEQ ID NO: 82234 - DNA, 15 bp, Homo sapiens
aatagggccagaatg

SEQ ID NO: 82235 - DNA, 15 bp, Homo sapiens
atagggccagaatga

SEQ ID NO: 82236 - DNA, 15 bp, Homo sapiens
tagggccagaatgaa

SEQ ID NO: 82237 - DNA, 15 bp, Homo sapiens
agggccagaatgaaa

SEQ ID NO: 82238 - DNA, 15 bp, Homo sapiens
gggccagaatgaaag

SEQ ID NO: 82239 - DNA, 15 bp, Homo sapiens
ggccagaatgaaaga

SEQ ID NO: 82240 - DNA, 15 bp, Homo sapiens
gccagaatgaaagat

SEQ ID NO: 82241 - DNA, 15 bp, Homo sapiens
ccagaatgaaagata

SEQ ID NO: 82242 - DNA, 15 bp, Homo sapiens
cagaatgaaagatag

SEQ ID NO: 82243 - DNA, 15 bp, Homo sapiens
agaatgaaagatagc

SEQ ID NO: 82244 - DNA, 15 bp, Homo sapiens
gaatgaaagatagca

SEQ ID NO: 82245 - DNA, 15 bp, Homo sapiens
aatgaaagatagcaa

SEQ ID NO: 82246 - DNA, 15 bp, Homo sapiens
atgaaagatagcaag

SEQ ID NO: 82247 - DNA, 15 bp, Homo sapiens
tgaaagatagcaaga

SEQ ID NO: 82248 - DNA, 15 bp, Homo sapiens
gaaagatagcaagaa

SEQ ID NO: 82249 - DNA, 15 bp, Homo sapiens
aaagatagcaagaat

SEQ ID NO: 82250 - DNA, 15 bp, Homo sapiens
aagatagcaagaata

SEQ ID NO: 82251 - DNA, 15 bp, Homo sapiens
agatagcaagaatag

SEQ ID NO: 82252 - DNA, 15 bp, Homo sapiens
gatagcaagaatagt

SEQ ID NO: 82253 - DNA, 15 bp, Homo sapiens
atagcaagaatagtg

SEQ ID NO: 82254 - DNA, 15 bp, Homo sapiens
tagcaagaatagtgt

SEQ ID NO: 82255 - DNA, 15 bp, Homo sapiens
agcaagaatagtgtt

SEQ ID NO: 82256 - DNA, 15 bp, Homo sapiens
gcaagaatagtgtta

SEQ ID NO: 82257 - DNA, 15 bp, Homo sapiens
caagaatagtgttat

SEQ ID NO: 82258 - DNA, 15 bp, Homo sapiens
aagaatagtgttatg

SEQ ID NO: 82259 - DNA, 15 bp, Homo sapiens
agaatagtgttatga

SEQ ID NO: 82260 - DNA, 15 bp, Homo sapiens
gaatagtgttatgaa

SEQ ID NO: 82261 - DNA, 15 bp, Homo sapiens
aatagtgttatgaaa

SEQ ID NO: 82262 - DNA, 15 bp, Homo sapiens
atagtgttatgaaaa

SEQ ID NO: 82263 - DNA, 15 bp, Homo sapiens
tagtgttatgaaaat

SEQ ID NO: 82264 - DNA, 15 bp, Homo sapiens
agtgttatgaaaata

SEQ ID NO: 82265 - DNA, 15 bp, Homo sapiens
gtgttatgaaaataa

SEQ ID NO: 82266 - DNA, 15 bp, Homo sapiens
tgttatgaaaataaa

SEQ ID NO: 82267 - DNA, 15 bp, Homo sapiens
gttatgaaaataaaa

SEQ ID NO: 82268 - DNA, 15 bp, Homo sapiens
ttatgaaaataaaat

SEQ ID NO: 82269 - DNA, 15 bp, Homo sapiens
tatgaaaataaaatg

SEQ ID NO: 82270 - DNA, 15 bp, Homo sapiens
atgaaaataaaatgc

SEQ ID NO: 82271 - DNA, 15 bp, Homo sapiens
tgaaaataaaatgca

SEQ ID NO: 82272 - DNA, 15 bp, Homo sapiens
gaaaataaaatgcaa

SEQ ID NO: 82273 - DNA, 15 bp, Homo sapiens
aaaataaaatgcaaa

SEQ ID NO: 82274 - DNA, 15 bp, Homo sapiens
aaataaaatgcaaag

SEQ ID NO: 82275 - DNA, 15 bp, Homo sapiens
aataaaatgcaaagt

SEQ ID NO: 82276 - DNA, 15 bp, Homo sapiens
ataaaatgcaaagtt

SEQ ID NO: 82277 - DNA, 15 bp, Homo sapiens
taaaatgcaaagttt

SEQ ID NO: 82278 - DNA, 15 bp, Homo sapiens
aaaatgcaaagttta

SEQ ID NO: 82279 - DNA, 15 bp, Homo sapiens
aaatgcaaagtttat

SEQ ID NO: 82280 - DNA, 15 bp, Homo sapiens
aatgcaaagtttata

SEQ ID NO: 82281 - DNA, 15 bp, Homo sapiens
atgcaaagtttataa

SEQ ID NO: 82282 - DNA, 15 bp, Homo sapiens
tgcaaagtttataat

SEQ ID NO: 82283 - DNA, 15 bp, Homo sapiens
gcaaagtttataata

SEQ ID NO: 82284 - DNA, 15 bp, Homo sapiens
caaagtttataatat

SEQ ID NO: 82285 - DNA, 15 bp, Homo sapiens
aaagtttataatatc

SEQ ID NO: 82286 - DNA, 15 bp, Homo sapiens
aagtttataatatca

SEQ ID NO: 82287 - DNA, 15 bp, Homo sapiens
agtttataatatcat

SEQ ID NO: 82288 - DNA, 15 bp, Homo sapiens
gtttataatatcatg

SEQ ID NO: 82289 - DNA, 15 bp, Homo sapiens
tttataatatcatgt

SEQ ID NO: 82290 - DNA, 15 bp, Homo sapiens
ttataatatcatgtg

SEQ ID NO: 82291 - DNA, 15 bp, Homo sapiens
tataatatcatgtgg

SEQ ID NO: 82292 - DNA, 15 bp, Homo sapiens
ataatatcatgtggt

SEQ ID NO: 82293 - DNA, 15 bp, Homo sapiens
taatatcatgtggta

SEQ ID NO: 82294 - DNA, 15 bp, Homo sapiens
aatatcatgtggtaa

SEQ ID NO: 82295 - DNA, 15 bp, Homo sapiens
atatcatgtggtaaa

SEQ ID NO: 82296 - DNA, 15 bp, Homo sapiens
tatcatgtggtaaaa

SEQ ID NO: 82297 - DNA, 15 bp, Homo sapiens
atcatgtggtaaaat

SEQ ID NO: 82298 - DNA, 15 bp, Homo sapiens
tcatgtggtaaaatg

SEQ ID NO: 82299 - DNA, 15 bp, Homo sapiens
catgtggtaaaatgt

SEQ ID NO: 82300 - DNA, 15 bp, Homo sapiens
atgtggtaaaatgta

SEQ ID NO: 82301 - DNA, 15 bp, Homo sapiens
tgtggtaaaatgtaa

SEQ ID NO: 82302 - DNA, 15 bp, Homo sapiens
gtggtaaaatgtaat

SEQ ID NO: 82303 - DNA, 15 bp, Homo sapiens
tggtaaaatgtaata

SEQ ID NO: 82304 - DNA, 15 bp, Homo sapiens
ggtaaaatgtaatag

SEQ ID NO: 82305 - DNA, 15 bp, Homo sapiens
gtaaaatgtaatagt

SEQ ID NO: 82306 - DNA, 15 bp, Homo sapiens
taaaatgtaatagta

SEQ ID NO: 82307 - DNA, 15 bp, Homo sapiens
aaaatgtaatagtat

SEQ ID NO: 82308 - DNA, 15 bp, Homo sapiens
aaatgtaatagtatt

SEQ ID NO: 82309 - DNA, 15 bp, Homo sapiens
aatgtaatagtattt

SEQ ID NO: 82310 - DNA, 15 bp, Homo sapiens
atgtaatagtattta

SEQ ID NO: 82311 - DNA, 15 bp, Homo sapiens
tgtaatagtatttac

SEQ ID NO: 82312 - DNA, 15 bp, Homo sapiens
gtaatagtatttact

SEQ ID NO: 82313 - DNA, 15 bp, Homo sapiens
taatagtatttactt

SEQ ID NO: 82314 - DNA, 15 bp, Homo sapiens
aatagtatttacttc

SEQ ID NO: 82315 - DNA, 15 bp, Homo sapiens
atagtatttacttca

SEQ ID NO: 82316 - DNA, 15 bp, Homo sapiens
tagtatttacttcat

SEQ ID NO: 82317 - DNA, 15 bp, Homo sapiens
agtatttacttcatc

SEQ ID NO: 82318 - DNA, 15 bp, Homo sapiens
gtatttacttcatca

SEQ ID NO: 82319 - DNA, 15 bp, Homo sapiens
tatttacttcatcag

SEQ ID NO: 82320 - DNA, 15 bp, Homo sapiens
atttacttcatcagt

SEQ ID NO: 82321 - DNA, 15 bp, Homo sapiens
tttacttcatcagta

SEQ ID NO: 82322 - DNA, 15 bp, Homo sapiens
ttacttcatcagtag

SEQ ID NO: 82323 - DNA, 15 bp, Homo sapiens
tacttcatcagtaga

SEQ ID NO: 82324 - DNA, 15 bp, Homo sapiens
acttcatcagtagaa

SEQ ID NO: 82325 - DNA, 15 bp, Homo sapiens
cttcatcagtagaac

SEQ ID NO: 82326 - DNA, 15 bp, Homo sapiens
ttcatcagtagaact

SEQ ID NO: 82327 - DNA, 15 bp, Homo sapiens
tcatcagtagaactg

SEQ ID NO: 82328 - DNA, 15 bp, Homo sapiens
catcagtagaactgc

SEQ ID NO: 82329 - DNA, 15 bp, Homo sapiens
atcagtagaactgct

SEQ ID NO: 82330 - DNA, 15 bp, Homo sapiens
tcagtagaactgctc

SEQ ID NO: 82331 - DNA, 15 bp, Homo sapiens
cagtagaactgctct

SEQ ID NO: 82332 - DNA, 15 bp, Homo sapiens
agtagaactgctcta

SEQ ID NO: 82333 - DNA, 15 bp, Homo sapiens
gtagaactgctctag

SEQ ID NO: 82334 - DNA, 15 bp, Homo sapiens
tagaactgctctagt

SEQ ID NO: 82335 - DNA, 15 bp, Homo sapiens
agaactgctctagta

SEQ ID NO: 82336 - DNA, 15 bp, Homo sapiens
gaactgctctagtag

SEQ ID NO: 82337 - DNA, 15 bp, Homo sapiens
aactgctctagtagc

SEQ ID NO: 82338 - DNA, 15 bp, Homo sapiens
actgctctagtagct

SEQ ID NO: 82339 - DNA, 15 bp, Homo sapiens
ctgctctagtagctg

SEQ ID NO: 82340 - DNA, 15 bp, Homo sapiens
tgctctagtagctgt

SEQ ID NO: 82341 - DNA, 15 bp, Homo sapiens
gctctagtagctgta

SEQ ID NO: 82342 - DNA, 15 bp, Homo sapiens
ctctagtagctgtat

SEQ ID NO: 82343 - DNA, 15 bp, Homo sapiens
tctagtagctgtata

SEQ ID NO: 82344 - DNA, 15 bp, Homo sapiens
ctagtagctgtatat

SEQ ID NO: 82345 - DNA, 15 bp, Homo sapiens
tagtagctgtatatt

SEQ ID NO: 82346 - DNA, 15 bp, Homo sapiens
agtagctgtatattc

SEQ ID NO: 82347 - DNA, 15 bp, Homo sapiens
gtagctgtatattct

SEQ ID NO: 82348 - DNA, 15 bp, Homo sapiens
tagctgtatattctc

SEQ ID NO: 82349 - DNA, 15 bp, Homo sapiens
agctgtatattctcc

SEQ ID NO: 82350 - DNA, 15 bp, Homo sapiens
gctgtatattctcca

SEQ ID NO: 82351 - DNA, 15 bp, Homo sapiens
ctgtatattctccat

SEQ ID NO: 82352 - DNA, 15 bp, Homo sapiens
tgtatattctccatc

SEQ ID NO: 82353 - DNA, 15 bp, Homo sapiens
gtatattctccatcc

SEQ ID NO: 82354 - DNA, 15 bp, Homo sapiens
tatattctccatcct

SEQ ID NO: 82355 - DNA, 15 bp, Homo sapiens
atattctccatcctt

SEQ ID NO: 82356 - DNA, 15 bp, Homo sapiens
tattctccatccttg

SEQ ID NO: 82357 - DNA, 15 bp, Homo sapiens
attctccatccttgc

SEQ ID NO: 82358 - DNA, 15 bp, Homo sapiens
ttctccatccttgca

SEQ ID NO: 82359 - DNA, 15 bp, Homo sapiens
tctccatccttgcat

SEQ ID NO: 82360 - DNA, 15 bp, Homo sapiens
ctccatccttgcata

SEQ ID NO: 82361 - DNA, 15 bp, Homo sapiens
tccatccttgcatag

SEQ ID NO: 82362 - DNA, 15 bp, Homo sapiens
ccatccttgcatagg

SEQ ID NO: 82363 - DNA, 15 bp, Homo sapiens
catccttgcataggt

SEQ ID NO: 82364 - DNA, 15 bp, Homo sapiens
atccttgcataggtt

SEQ ID NO: 82365 - DNA, 15 bp, Homo sapiens
tccttgcataggttg

SEQ ID NO: 82366 - DNA, 15 bp, Homo sapiens
ccttgcataggttgg

SEQ ID NO: 82367 - DNA, 15 bp, Homo sapiens
cttgcataggttgga

SEQ ID NO: 82368 - DNA, 15 bp, Homo sapiens
ttgcataggttggaa

SEQ ID NO: 82369 - DNA, 15 bp, Homo sapiens
tgcataggttggaat

SEQ ID NO: 82370 - DNA, 15 bp, Homo sapiens
gcataggttggaata

SEQ ID NO: 82371 - DNA, 15 bp, Homo sapiens
cataggttggaatat

SEQ ID NO: 82372 - DNA, 15 bp, Homo sapiens
ataggttggaatatc

SEQ ID NO: 82373 - DNA, 15 bp, Homo sapiens
taggttggaatatcc

SEQ ID NO: 82374 - DNA, 15 bp, Homo sapiens
aggttggaatatccc

SEQ ID NO: 82375 - DNA, 15 bp, Homo sapiens
ggttggaatatcccc

SEQ ID NO: 82376 - DNA, 15 bp, Homo sapiens
gttggaatatccccc

SEQ ID NO: 82377 - DNA, 15 bp, Homo sapiens
ttggaatatccccca

SEQ ID NO: 82378 - DNA, 15 bp, Homo sapiens
tggaatatcccccaa

SEQ ID NO: 82379 - DNA, 15 bp, Homo sapiens
ggaatatcccccaag

SEQ ID NO: 82380 - DNA, 15 bp, Homo sapiens
gaatatcccccaagt

SEQ ID NO: 82381 - DNA, 15 bp, Homo sapiens
aatatcccccaagtg

SEQ ID NO: 82382 - DNA, 15 bp, Homo sapiens
atatcccccaagtga

SEQ ID NO: 82383 - DNA, 15 bp, Homo sapiens
tatcccccaagtgaa

SEQ ID NO: 82384 - DNA, 15 bp, Homo sapiens
atcccccaagtgaaa

SEQ ID NO: 82385 - DNA, 15 bp, Homo sapiens
tcccccaagtgaaaa

SEQ ID NO: 82386 - DNA, 15 bp, Homo sapiens
cccccaagtgaaaag

SEQ ID NO: 82387 - DNA, 15 bp, Homo sapiens
ccccaagtgaaaaga

SEQ ID NO: 82388 - DNA, 15 bp, Homo sapiens
cccaagtgaaaagag

SEQ ID NO: 82389 - DNA, 15 bp, Homo sapiens
ccaagtgaaaagaga

SEQ ID NO: 82390 - DNA, 15 bp, Homo sapiens
caagtgaaaagagat

SEQ ID NO: 82391 - DNA, 15 bp, Homo sapiens
aagtgaaaagagatt

SEQ ID NO: 82392 - DNA, 15 bp, Homo sapiens
agtgaaaagagattg

SEQ ID NO: 82393 - DNA, 15 bp, Homo sapiens
gtgaaaagagattga

SEQ ID NO: 82394 - DNA, 15 bp, Homo sapiens
tgaaaagagattgat

SEQ ID NO: 82395 - DNA, 15 bp, Homo sapiens
gaaaagagattgatg

SEQ ID NO: 82396 - DNA, 15 bp, Homo sapiens
aaaagagattgatgg

SEQ ID NO: 82397 - DNA, 15 bp, Homo sapiens
aaagagattgatggg

SEQ ID NO: 82398 - DNA, 15 bp, Homo sapiens
aagagattgatgggc

SEQ ID NO: 82399 - DNA, 15 bp, Homo sapiens
agagattgatgggct

SEQ ID NO: 82400 - DNA, 15 bp, Homo sapiens
gagattgatgggcta

SEQ ID NO: 82401 - DNA, 15 bp, Homo sapiens
agattgatgggctaa

SEQ ID NO: 82402 - DNA, 15 bp, Homo sapiens
gattgatgggctaat

SEQ ID NO: 82403 - DNA, 15 bp, Homo sapiens
attgatgggctaata

SEQ ID NO: 82404 - DNA, 15 bp, Homo sapiens
ttgatgggctaatag

SEQ ID NO: 82405 - DNA, 15 bp, Homo sapiens
tgatgggctaatagt

SEQ ID NO: 82406 - DNA, 15 bp, Homo sapiens
gatgggctaatagtt

SEQ ID NO: 82407 - DNA, 15 bp, Homo sapiens
atgggctaatagtta

SEQ ID NO: 82408 - DNA, 15 bp, Homo sapiens
tgggctaatagttaa

SEQ ID NO: 82409 - DNA, 15 bp, Homo sapiens
gggctaatagttaat

SEQ ID NO: 82410 - DNA, 15 bp, Homo sapiens
ggctaatagttaata

SEQ ID NO: 82411 - DNA, 15 bp, Homo sapiens
gctaatagttaatag

SEQ ID NO: 82412 - DNA, 15 bp, Homo sapiens
ctaatagttaataga

SEQ ID NO: 82413 - DNA, 15 bp, Homo sapiens
taatagttaatagaa

SEQ ID NO: 82414 - DNA, 15 bp, Homo sapiens
aatagttaatagaaa

SEQ ID NO: 82415 - DNA, 15 bp, Homo sapiens
atagttaatagaaaa

SEQ ID NO: 82416 - DNA, 15 bp, Homo sapiens
tagttaatagaaaat

SEQ ID NO: 82417 - DNA, 15 bp, Homo sapiens
agttaatagaaaatg

SEQ ID NO: 82418 - DNA, 15 bp, Homo sapiens
gttaatagaaaatgg

SEQ ID NO: 82419 - DNA, 15 bp, Homo sapiens
ttaatagaaaatgga

SEQ ID NO: 82420 - DNA, 15 bp, Homo sapiens
taatagaaaatggag

SEQ ID NO: 82421 - DNA, 15 bp, Homo sapiens
aatagaaaatggaga

SEQ ID NO: 82422 - DNA, 15 bp, Homo sapiens
atagaaaatggagat

SEQ ID NO: 82423 - DNA, 15 bp, Homo sapiens
tagaaaatggagatc

SEQ ID NO: 82424 - DNA, 15 bp, Homo sapiens
agaaaatggagatct

SEQ ID NO: 82425 - DNA, 15 bp, Homo sapiens
gaaaatggagatctg

SEQ ID NO: 82426 - DNA, 15 bp, Homo sapiens
aaaatggagatctgt

SEQ ID NO: 82427 - DNA, 15 bp, Homo sapiens
aaatggagatctgta

SEQ ID NO: 82428 - DNA, 15 bp, Homo sapiens
aatggagatctgtac

SEQ ID NO: 82429 - DNA, 15 bp, Homo sapiens
atggagatctgtaca

SEQ ID NO: 82430 - DNA, 15 bp, Homo sapiens
tggagatctgtacat

SEQ ID NO: 82431 - DNA, 15 bp, Homo sapiens
ggagatctgtacata

SEQ ID NO: 82432 - DNA, 15 bp, Homo sapiens
gagatctgtacatac

SEQ ID NO: 82433 - DNA, 15 bp, Homo sapiens
agatctgtacataca

SEQ ID NO: 82434 - DNA, 15 bp, Homo sapiens
gatctgtacatacag

SEQ ID NO: 82435 - DNA, 15 bp, Homo sapiens
atctgtacatacagt

SEQ ID NO: 82436 - DNA, 15 bp, Homo sapiens
tctgtacatacagtg

SEQ ID NO: 82437 - DNA, 15 bp, Homo sapiens
ctgtacatacagtgt

SEQ ID NO: 82438 - DNA, 15 bp, Homo sapiens
tgtacatacagtgtt

SEQ ID NO: 82439 - DNA, 15 bp, Homo sapiens
gtacatacagtgtta

SEQ ID NO: 82440 - DNA, 15 bp, Homo sapiens
tacatacagtgttaa

SEQ ID NO: 82441 - DNA, 15 bp, Homo sapiens
acatacagtgttaag

SEQ ID NO: 82442 - DNA, 15 bp, Homo sapiens
catacagtgttaaga

SEQ ID NO: 82443 - DNA, 15 bp, Homo sapiens
atacagtgttaagaa

SEQ ID NO: 82444 - DNA, 15 bp, Homo sapiens
tacagtgttaagaat

SEQ ID NO: 82445 - DNA, 15 bp, Homo sapiens
acagtgttaagaatg

SEQ ID NO: 82446 - DNA, 15 bp, Homo sapiens
cagtgttaagaatgt

SEQ ID NO: 82447 - DNA, 15 bp, Homo sapiens
agtgttaagaatgta

SEQ ID NO: 82448 - DNA, 15 bp, Homo sapiens
gtgttaagaatgtag

SEQ ID NO: 82449 - DNA, 15 bp, Homo sapiens
tgttaagaatgtaga

SEQ ID NO: 82450 - DNA, 15 bp, Homo sapiens
gttaagaatgtagat

SEQ ID NO: 82451 - DNA, 15 bp, Homo sapiens
ttaagaatgtagata

SEQ ID NO: 82452 - DNA, 15 bp, Homo sapiens
taagaatgtagatat

SEQ ID NO: 82453 - DNA, 15 bp, Homo sapiens
aagaatgtagatatt

SEQ ID NO: 82454 - DNA, 15 bp, Homo sapiens
agaatgtagatatta

SEQ ID NO: 82455 - DNA, 15 bp, Homo sapiens
gaatgtagatattaa

SEQ ID NO: 82456 - DNA, 15 bp, Homo sapiens
aatgtagatattaaa

SEQ ID NO: 82457 - DNA, 15 bp, Homo sapiens
atgtagatattaaaa

SEQ ID NO: 82458 - DNA, 15 bp, Homo sapiens
tgtagatattaaaat

SEQ ID NO: 82459 - DNA, 15 bp, Homo sapiens
gtagatattaaaatt

SEQ ID NO: 82460 - DNA, 15 bp, Homo sapiens
tagatattaaaattg

SEQ ID NO: 82461 - DNA, 15 bp, Homo sapiens
agatattaaaattgt

SEQ ID NO: 82462 - DNA, 15 bp, Homo sapiens
gatattaaaattgtt

SEQ ID NO: 82463 - DNA, 15 bp, Homo sapiens
atattaaaattgtta

SEQ ID NO: 82464 - DNA, 15 bp, Homo sapiens
tattaaaattgttat

SEQ ID NO: 82465 - DNA, 15 bp, Homo sapiens
attaaaattgttata

SEQ ID NO: 82466 - DNA, 15 bp, Homo sapiens
ttaaaattgttatat

SEQ ID NO: 82467 - DNA, 15 bp, Homo sapiens
taaaattgttatatt

SEQ ID NO: 82468 - DNA, 15 bp, Homo sapiens
aaaattgttatattt

SEQ ID NO: 82469 - DNA, 15 bp, Homo sapiens
aaattgttatattta

SEQ ID NO: 82470 - DNA, 15 bp, Homo sapiens
aattgttatatttag

SEQ ID NO: 82471 - DNA, 15 bp, Homo sapiens
attgttatatttagc

SEQ ID NO: 82472 - DNA, 15 bp, Homo sapiens
ttgttatatttagct

SEQ ID NO: 82473 - DNA, 15 bp, Homo sapiens
tgttatatttagctg

SEQ ID NO: 82474 - DNA, 15 bp, Homo sapiens
gttatatttagctgt

SEQ ID NO: 82475 - DNA, 15 bp, Homo sapiens
ttatatttagctgtt

SEQ ID NO: 82476 - DNA, 15 bp, Homo sapiens
tatatttagctgtta

SEQ ID NO: 82477 - DNA, 15 bp, Homo sapiens
atatttagctgttac

SEQ ID NO: 82478 - DNA, 15 bp, Homo sapiens
tatttagctgttaca

SEQ ID NO: 82479 - DNA, 15 bp, Homo sapiens
atttagctgttacat

SEQ ID NO: 82480 - DNA, 15 bp, Homo sapiens
tttagctgttacata

SEQ ID NO: 82481 - DNA, 15 bp, Homo sapiens
ttagctgttacataa

SEQ ID NO: 82482 - DNA, 15 bp, Homo sapiens
tagctgttacataat

SEQ ID NO: 82483 - DNA, 15 bp, Homo sapiens
agctgttacataata

SEQ ID NO: 82484 - DNA, 15 bp, Homo sapiens
gctgttacataatat

SEQ ID NO: 82485 - DNA, 15 bp, Homo sapiens
ctgttacataatatt

SEQ ID NO: 82486 - DNA, 15 bp, Homo sapiens
tgttacataatatta

SEQ ID NO: 82487 - DNA, 15 bp, Homo sapiens
gttacataatattaa

SEQ ID NO: 82488 - DNA, 15 bp, Homo sapiens
ttacataatattaag

SEQ ID NO: 82489 - DNA, 15 bp, Homo sapiens
tacataatattaaga

SEQ ID NO: 82490 - DNA, 15 bp, Homo sapiens
acataatattaagac

SEQ ID NO: 82491 - DNA, 15 bp, Homo sapiens
cataatattaagact

SEQ ID NO: 82492 - DNA, 15 bp, Homo sapiens
ataatattaagactc

SEQ ID NO: 82493 - DNA, 15 bp, Homo sapiens
taatattaagactca

SEQ ID NO: 82494 - DNA, 15 bp, Homo sapiens
aatattaagactcag

SEQ ID NO: 82495 - DNA, 15 bp, Homo sapiens
atattaagactcaga

SEQ ID NO: 82496 - DNA, 15 bp, Homo sapiens
tattaagactcagag

SEQ ID NO: 82497 - DNA, 15 bp, Homo sapiens
attaagactcagagt

SEQ ID NO: 82498 - DNA, 15 bp, Homo sapiens
ttaagactcagagtt

SEQ ID NO: 82499 - DNA, 15 bp, Homo sapiens
taagactcagagtta

SEQ ID NO: 82500 - DNA, 15 bp, Homo sapiens
aagactcagagttaa

SEQ ID NO: 82501 - DNA, 15 bp, Homo sapiens
agactcagagttaag

SEQ ID NO: 82502 - DNA, 15 bp, Homo sapiens
gactcagagttaagt

SEQ ID NO: 82503 - DNA, 15 bp, Homo sapiens
actcagagttaagta

SEQ ID NO: 82504 - DNA, 15 bp, Homo sapiens
ctcagagttaagtaa

SEQ ID NO: 82505 - DNA, 15 bp, Homo sapiens
tcagagttaagtaat

SEQ ID NO: 82506 - DNA, 15 bp, Homo sapiens
cagagttaagtaatt

SEQ ID NO: 82507 - DNA, 15 bp, Homo sapiens
agagttaagtaattt

SEQ ID NO: 82508 - DNA, 15 bp, Homo sapiens
gagttaagtaatttc

SEQ ID NO: 82509 - DNA, 15 bp, Homo sapiens
agttaagtaatttca

SEQ ID NO: 82510 - DNA, 15 bp, Homo sapiens
gttaagtaatttcac

SEQ ID NO: 82511 - DNA, 15 bp, Homo sapiens
ttaagtaatttcact

SEQ ID NO: 82512 - DNA, 15 bp, Homo sapiens
taagtaatttcactg

SEQ ID NO: 82513 - DNA, 15 bp, Homo sapiens
aagtaatttcactga

SEQ ID NO: 82514 - DNA, 15 bp, Homo sapiens
agtaatttcactgaa

SEQ ID NO: 82515 - DNA, 15 bp, Homo sapiens
gtaatttcactgaaa

SEQ ID NO: 82516 - DNA, 15 bp, Homo sapiens
taatttcactgaaat

SEQ ID NO: 82517 - DNA, 15 bp, Homo sapiens
aatttcactgaaatt

SEQ ID NO: 82518 - DNA, 15 bp, Homo sapiens
atttcactgaaattg

SEQ ID NO: 82519 - DNA, 15 bp, Homo sapiens
tttcactgaaattga

SEQ ID NO: 82520 - DNA, 15 bp, Homo sapiens
ttcactgaaattgat

SEQ ID NO: 82521 - DNA, 15 bp, Homo sapiens
tcactgaaattgatt

SEQ ID NO: 82522 - DNA, 15 bp, Homo sapiens
cactgaaattgattg

SEQ ID NO: 82523 - DNA, 15 bp, Homo sapiens
actgaaattgattgc

SEQ ID NO: 82524 - DNA, 15 bp, Homo sapiens
ctgaaattgattgct

SEQ ID NO: 82525 - DNA, 15 bp, Homo sapiens
tgaaattgattgctt

SEQ ID NO: 82526 - DNA, 15 bp, Homo sapiens
gaaattgattgcttt

SEQ ID NO: 82527 - DNA, 15 bp, Homo sapiens
aaattgattgctttt

SEQ ID NO: 82528 - DNA, 15 bp, Homo sapiens
aattgattgcttttt

SEQ ID NO: 82529 - DNA, 15 bp, Homo sapiens
attgattgctttttg

SEQ ID NO: 82530 - DNA, 15 bp, Homo sapiens
ttgattgctttttgt

SEQ ID NO: 82531 - DNA, 15 bp, Homo sapiens
tgattgctttttgtg

SEQ ID NO: 82532 - DNA, 15 bp, Homo sapiens
gattgctttttgtgt

SEQ ID NO: 82533 - DNA, 15 bp, Homo sapiens
attgctttttgtgtc

SEQ ID NO: 82534 - DNA, 15 bp, Homo sapiens
ttgctttttgtgtct

SEQ ID NO: 82535 - DNA, 15 bp, Homo sapiens
tgctttttgtgtctt

SEQ ID NO: 82536 - DNA, 15 bp, Homo sapiens
gctttttgtgtcttg

SEQ ID NO: 82537 - DNA, 15 bp, Homo sapiens
ctttttgtgtcttgg

SEQ ID NO: 82538 - DNA, 15 bp, Homo sapiens
tttttgtgtcttgga

SEQ ID NO: 82539 - DNA, 15 bp, Homo sapiens
ttttgtgtcttggag

SEQ ID NO: 82540 - DNA, 15 bp, Homo sapiens
tttgtgtcttggagt

SEQ ID NO: 82541 - DNA, 15 bp, Homo sapiens
ttgtgtcttggagtc

SEQ ID NO: 82542 - DNA, 15 bp, Homo sapiens
tgtgtcttggagtca

SEQ ID NO: 82543 - DNA, 15 bp, Homo sapiens
gtgtcttggagtcaa

SEQ ID NO: 82544 - DNA, 15 bp, Homo sapiens
tgtcttggagtcaaa

SEQ ID NO: 82545 - DNA, 15 bp, Homo sapiens
gtcttggagtcaaaa

SEQ ID NO: 82546 - DNA, 15 bp, Homo sapiens
tcttggagtcaaaat

SEQ ID NO: 82547 - DNA, 15 bp, Homo sapiens
cttggagtcaaaata

SEQ ID NO: 82548 - DNA, 15 bp, Homo sapiens
ttggagtcaaaataa

SEQ ID NO: 82549 - DNA, 15 bp, Homo sapiens
tggagtcaaaataaa

SEQ ID NO: 82550 - DNA, 15 bp, Homo sapiens
ggagtcaaaataaat

SEQ ID NO: 82551 - DNA, 15 bp, Homo sapiens
gagtcaaaataaata

SEQ ID NO: 82552 - DNA, 15 bp, Homo sapiens
agtcaaaataaataa

SEQ ID NO: 82553 - DNA, 15 bp, Homo sapiens
gtcaaaataaataac

SEQ ID NO: 82554 - DNA, 15 bp, Homo sapiens
tcaaaataaataact

SEQ ID NO: 82555 - DNA, 15 bp, Homo sapiens
caaaataaataactg

SEQ ID NO: 82556 - DNA, 15 bp, Homo sapiens
aaaataaataactga

SEQ ID NO: 82557 - DNA, 15 bp, Homo sapiens
aaataaataactgaa

SEQ ID NO: 82558 - DNA, 15 bp, Homo sapiens
aataaataactgaaa

SEQ ID NO: 82559 - DNA, 15 bp, Homo sapiens
ataaataactgaaat

SEQ ID NO: 82560 - DNA, 15 bp, Homo sapiens
taaataactgaaatc

SEQ ID NO: 82561 - DNA, 15 bp, Homo sapiens
aaataactgaaatct

SEQ ID NO: 82562 - DNA, 15 bp, Homo sapiens
aataactgaaatcta

SEQ ID NO: 82563 - DNA, 15 bp, Homo sapiens
ataactgaaatctac

SEQ ID NO: 82564 - DNA, 15 bp, Homo sapiens
taactgaaatctact

SEQ ID NO: 82565 - DNA, 15 bp, Homo sapiens
aactgaaatctacta

SEQ ID NO: 82566 - DNA, 15 bp, Homo sapiens
actgaaatctactat

SEQ ID NO: 82567 - DNA, 15 bp, Homo sapiens
ctgaaatctactata

SEQ ID NO: 82568 - DNA, 15 bp, Homo sapiens
tgaaatctactatac

SEQ ID NO: 82569 - DNA, 15 bp, Homo sapiens
gaaatctactatact

SEQ ID NO: 82570 - DNA, 15 bp, Homo sapiens
aaatctactatactt

SEQ ID NO: 82571 - DNA, 15 bp, Homo sapiens
aatctactatacttg

SEQ ID NO: 82572 - DNA, 15 bp, Homo sapiens
atctactatacttgg

SEQ ID NO: 82573 - DNA, 15 bp, Homo sapiens
tctactatacttggc

SEQ ID NO: 82574 - DNA, 15 bp, Homo sapiens
ctactatacttggct

SEQ ID NO: 82575 - DNA, 15 bp, Homo sapiens
tactatacttggctc

SEQ ID NO: 82576 - DNA, 15 bp, Homo sapiens
actatacttggctca

SEQ ID NO: 82577 - DNA, 15 bp, Homo sapiens
ctatacttggctcat

SEQ ID NO: 82578 - DNA, 15 bp, Homo sapiens
tatacttggctcatg

SEQ ID NO: 82579 - DNA, 15 bp, Homo sapiens
atacttggctcatgc

SEQ ID NO: 82580 - DNA, 15 bp, Homo sapiens
tacttggctcatgct

SEQ ID NO: 82581 - DNA, 15 bp, Homo sapiens
acttggctcatgctt

SEQ ID NO: 82582 - DNA, 15 bp, Homo sapiens
cttggctcatgctta

SEQ ID NO: 82583 - DNA, 15 bp, Homo sapiens
ttggctcatgcttaa

SEQ ID NO: 82584 - DNA, 15 bp, Homo sapiens
tggctcatgcttaat

SEQ ID NO: 82585 - DNA, 15 bp, Homo sapiens
ggctcatgcttaatt

SEQ ID NO: 82586 - DNA, 15 bp, Homo sapiens
gctcatgcttaatta

SEQ ID NO: 82587 - DNA, 15 bp, Homo sapiens
ctcatgcttaattaa

SEQ ID NO: 82588 - DNA, 15 bp, Homo sapiens
tcatgcttaattaat

SEQ ID NO: 82589 - DNA, 15 bp, Homo sapiens
catgcttaattaata

SEQ ID NO: 82590 - DNA, 15 bp, Homo sapiens
atgcttaattaatat

SEQ ID NO: 82591 - DNA, 15 bp, Homo sapiens
tgcttaattaatata

SEQ ID NO: 82592 - DNA, 15 bp, Homo sapiens
gcttaattaatatac

SEQ ID NO: 82593 - DNA, 15 bp, Homo sapiens
cttaattaatatact

SEQ ID NO: 82594 - DNA, 15 bp, Homo sapiens
ttaattaatatactt

SEQ ID NO: 82595 - DNA, 15 bp, Homo sapiens
taattaatatactta

SEQ ID NO: 82596 - DNA, 15 bp, Homo sapiens
aattaatatacttag

SEQ ID NO: 82597 - DNA, 15 bp, Homo sapiens
attaatatacttaga

SEQ ID NO: 82598 - DNA, 15 bp, Homo sapiens
ttaatatacttagac

SEQ ID NO: 82599 - DNA, 15 bp, Homo sapiens
taatatacttagacc

SEQ ID NO: 82600 - DNA, 15 bp, Homo sapiens
aatatacttagacca

SEQ ID NO: 82601 - DNA, 15 bp, Homo sapiens
atatacttagaccat

SEQ ID NO: 82602 - DNA, 15 bp, Homo sapiens
tatacttagaccata

SEQ ID NO: 82603 - DNA, 15 bp, Homo sapiens
atacttagaccatat

SEQ ID NO: 82604 - DNA, 15 bp, Homo sapiens
tacttagaccatatt

SEQ ID NO: 82605 - DNA, 15 bp, Homo sapiens
acttagaccatattt

SEQ ID NO: 82606 - DNA, 15 bp, Homo sapiens
cttagaccatatttc

SEQ ID NO: 82607 - DNA, 15 bp, Homo sapiens
ttagaccatatttcg

SEQ ID NO: 82608 - DNA, 15 bp, Homo sapiens
tagaccatatttcgg

SEQ ID NO: 82609 - DNA, 15 bp, Homo sapiens
agaccatatttcgga

SEQ ID NO: 82610 - DNA, 15 bp, Homo sapiens
gaccatatttcggat

SEQ ID NO: 82611 - DNA, 15 bp, Homo sapiens
accatatttcggatg

SEQ ID NO: 82612 - DNA, 15 bp, Homo sapiens
ccatatttcggatga

SEQ ID NO: 82613 - DNA, 15 bp, Homo sapiens
catatttcggatgaa

SEQ ID NO: 82614 - DNA, 15 bp, Homo sapiens
atatttcggatgaat

SEQ ID NO: 82615 - DNA, 15 bp, Homo sapiens
tatttcggatgaatt

SEQ ID NO: 82616 - DNA, 15 bp, Homo sapiens
atttcggatgaatta

SEQ ID NO: 82617 - DNA, 15 bp, Homo sapiens
tttcggatgaattat

SEQ ID NO: 82618 - DNA, 15 bp, Homo sapiens
ttcggatgaattatt

SEQ ID NO: 82619 - DNA, 15 bp, Homo sapiens
tcggatgaattattc

SEQ ID NO: 82620 - DNA, 15 bp, Homo sapiens
cggatgaattattca

SEQ ID NO: 82621 - DNA, 15 bp, Homo sapiens
ggatgaattattcac

SEQ ID NO: 82622 - DNA, 15 bp, Homo sapiens
gatgaattattcaca

SEQ ID NO: 82623 - DNA, 15 bp, Homo sapiens
atgaattattcacag

SEQ ID NO: 82624 - DNA, 15 bp, Homo sapiens
tgaattattcacaga

SEQ ID NO: 82625 - DNA, 15 bp, Homo sapiens
gaattattcacagaa

SEQ ID NO: 82626 - DNA, 15 bp, Homo sapiens
aattattcacagaat

SEQ ID NO: 82627 - DNA, 15 bp, Homo sapiens
attattcacagaatc

SEQ ID NO: 82628 - DNA, 15 bp, Homo sapiens
ttattcacagaatct

SEQ ID NO: 82629 - DNA, 15 bp, Homo sapiens
tattcacagaatcta

SEQ ID NO: 82630 - DNA, 15 bp, Homo sapiens
attcacagaatctaa

SEQ ID NO: 82631 - DNA, 15 bp, Homo sapiens
ttcacagaatctaaa

SEQ ID NO: 82632 - DNA, 15 bp, Homo sapiens
tcacagaatctaaag

SEQ ID NO: 82633 - DNA, 15 bp, Homo sapiens
cacagaatctaaagg

SEQ ID NO: 82634 - DNA, 15 bp, Homo sapiens
acagaatctaaagga

SEQ ID NO: 82635 - DNA, 15 bp, Homo sapiens
cagaatctaaaggag

SEQ ID NO: 82636 - DNA, 15 bp, Homo sapiens
agaatctaaaggagt

SEQ ID NO: 82637 - DNA, 15 bp, Homo sapiens
gaatctaaaggagta

SEQ ID NO: 82638 - DNA, 15 bp, Homo sapiens
aatctaaaggagtat

SEQ ID NO: 82639 - DNA, 15 bp, Homo sapiens
atctaaaggagtatc

SEQ ID NO: 82640 - DNA, 15 bp, Homo sapiens
tctaaaggagtatcc

SEQ ID NO: 82641 - DNA, 15 bp, Homo sapiens
ctaaaggagtatcct

SEQ ID NO: 82642 - DNA, 15 bp, Homo sapiens
taaaggagtatcctc

SEQ ID NO: 82643 - DNA, 15 bp, Homo sapiens
aaaggagtatcctcg

SEQ ID NO: 82644 - DNA, 15 bp, Homo sapiens
aaggagtatcctcgt

SEQ ID NO: 82645 - DNA, 15 bp, Homo sapiens
aggagtatcctcgtg

SEQ ID NO: 82646 - DNA, 15 bp, Homo sapiens
ggagtatcctcgtgt

SEQ ID NO: 82647 - DNA, 15 bp, Homo sapiens
gagtatcctcgtgtt

SEQ ID NO: 82648 - DNA, 15 bp, Homo sapiens
agtatcctcgtgttc

SEQ ID NO: 82649 - DNA, 15 bp, Homo sapiens
gtatcctcgtgttct

SEQ ID NO: 82650 - DNA, 15 bp, Homo sapiens
tatcctcgtgttctt

SEQ ID NO: 82651 - DNA, 15 bp, Homo sapiens
atcctcgtgttctta

SEQ ID NO: 82652 - DNA, 15 bp, Homo sapiens
tcctcgtgttcttac

SEQ ID NO: 82653 - DNA, 15 bp, Homo sapiens
cctcgtgttcttacc

SEQ ID NO: 82654 - DNA, 15 bp, Homo sapiens
ctcgtgttcttacct

SEQ ID NO: 82655 - DNA, 15 bp, Homo sapiens
tcgtgttcttacctt

SEQ ID NO: 82656 - DNA, 15 bp, Homo sapiens
cgtgttcttaccttc

SEQ ID NO: 82657 - DNA, 15 bp, Homo sapiens
gtgttcttaccttct

SEQ ID NO: 82658 - DNA, 15 bp, Homo sapiens
tgttcttaccttctt

SEQ ID NO: 82659 - DNA, 15 bp, Homo sapiens
gttcttaccttcttt

SEQ ID NO: 82660 - DNA, 15 bp, Homo sapiens
ttcttaccttcttta

SEQ ID NO: 82661 - DNA, 15 bp, Homo sapiens
tcttaccttctttat

SEQ ID NO: 82662 - DNA, 15 bp, Homo sapiens
cttaccttctttatc

SEQ ID NO: 82663 - DNA, 15 bp, Homo sapiens
ttaccttctttatcc

SEQ ID NO: 82664 - DNA, 15 bp, Homo sapiens
taccttctttatccc

SEQ ID NO: 82665 - DNA, 15 bp, Homo sapiens
accttctttatccct

SEQ ID NO: 82666 - DNA, 15 bp, Homo sapiens
ccttctttatccctg

SEQ ID NO: 82667 - DNA, 15 bp, Homo sapiens
cttctttatccctgt

SEQ ID NO: 82668 - DNA, 15 bp, Homo sapiens
ttctttatccctgtg

SEQ ID NO: 82669 - DNA, 15 bp, Homo sapiens
tctttatccctgtgt

SEQ ID NO: 82670 - DNA, 15 bp, Homo sapiens
ctttatccctgtgtt

SEQ ID NO: 82671 - DNA, 15 bp, Homo sapiens
tttatccctgtgttt

SEQ ID NO: 82672 - DNA, 15 bp, Homo sapiens
ttatccctgtgttta

SEQ ID NO: 82673 - DNA, 15 bp, Homo sapiens
tatccctgtgtttat

SEQ ID NO: 82674 - DNA, 15 bp, Homo sapiens
atccctgtgtttatt

SEQ ID NO: 82675 - DNA, 15 bp, Homo sapiens
tccctgtgtttattt

SEQ ID NO: 82676 - DNA, 15 bp, Homo sapiens
ccctgtgtttattta

SEQ ID NO: 82677 - DNA, 15 bp, Homo sapiens
cctgtgtttatttaa

SEQ ID NO: 82678 - DNA, 15 bp, Homo sapiens
ctgtgtttatttaaa

SEQ ID NO: 82679 - DNA, 15 bp, Homo sapiens
tgtgtttatttaaaa

SEQ ID NO: 82680 - DNA, 15 bp, Homo sapiens
gtgtttatttaaaaa

SEQ ID NO: 82681 - DNA, 15 bp, Homo sapiens
tgtttatttaaaaag

SEQ ID NO: 82682 - DNA, 15 bp, Homo sapiens
gtttatttaaaaagg

SEQ ID NO: 82683 - DNA, 15 bp, Homo sapiens
tttatttaaaaaggc

SEQ ID NO: 82684 - DNA, 15 bp, Homo sapiens
ttatttaaaaaggca

SEQ ID NO: 82685 - DNA, 15 bp, Homo sapiens
tatttaaaaaggcaa

SEQ ID NO: 82686 - DNA, 15 bp, Homo sapiens
atttaaaaaggcaaa

SEQ ID NO: 82687 - DNA, 15 bp, Homo sapiens
tttaaaaaggcaaaa

SEQ ID NO: 82688 - DNA, 15 bp, Homo sapiens
ttaaaaaggcaaaaa

SEQ ID NO: 82689 - DNA, 15 bp, Homo sapiens
taaaaaggcaaaaaa

SEQ ID NO: 82690 - DNA, 15 bp, Homo sapiens
aaaaaggcaaaaaaa

SEQ ID NO: 82691 - DNA, 15 bp, Homo sapiens
aaaaggcaaaaaaaa

SEQ ID NO: 82692 - DNA, 15 bp, Homo sapiens
aaaggcaaaaaaaat

SEQ ID NO: 82693 - DNA, 15 bp, Homo sapiens
aaggcaaaaaaaatg

SEQ ID NO: 82694 - DNA, 15 bp, Homo sapiens
aggcaaaaaaaatgg

SEQ ID NO: 82695 - DNA, 15 bp, Homo sapiens
ggcaaaaaaaatgga

SEQ ID NO: 82696 - DNA, 15 bp, Homo sapiens
gcaaaaaaaatggag

SEQ ID NO: 82697 - DNA, 15 bp, Homo sapiens
caaaaaaaatggagc

SEQ ID NO: 82698 - DNA, 15 bp, Homo sapiens
aaaaaaaatggagca

SEQ ID NO: 82699 - DNA, 15 bp, Homo sapiens
aaaaaaatggagcag

SEQ ID NO: 82700 - DNA, 15 bp, Homo sapiens
aaaaaatggagcaga

SEQ ID NO: 82701 - DNA, 15 bp, Homo sapiens
aaaaatggagcagat

SEQ ID NO: 82702 - DNA, 15 bp, Homo sapiens
aaaatggagcagatg

SEQ ID NO: 82703 - DNA, 15 bp, Homo sapiens
aaatggagcagatgc

SEQ ID NO: 82704 - DNA, 15 bp, Homo sapiens
aatggagcagatgct

SEQ ID NO: 82705 - DNA, 15 bp, Homo sapiens
atggagcagatgctg

SEQ ID NO: 82706 - DNA, 15 bp, Homo sapiens
tggagcagatgctgt

SEQ ID NO: 82707 - DNA, 15 bp, Homo sapiens
ggagcagatgctgtt

SEQ ID NO: 82708 - DNA, 15 bp, Homo sapiens
gagcagatgctgttg

SEQ ID NO: 82709 - DNA, 15 bp, Homo sapiens
agcagatgctgttgg

SEQ ID NO: 82710 - DNA, 15 bp, Homo sapiens
gcagatgctgttggt

SEQ ID NO: 82711 - DNA, 15 bp, Homo sapiens
cagatgctgttggtt

SEQ ID NO: 82712 - DNA, 15 bp, Homo sapiens
agatgctgttggttg

SEQ ID NO: 82713 - DNA, 15 bp, Homo sapiens
gatgctgttggttga

SEQ ID NO: 82714 - DNA, 15 bp, Homo sapiens
atgctgttggttgac

SEQ ID NO: 82715 - DNA, 15 bp, Homo sapiens
tgctgttggttgacc

SEQ ID NO: 82716 - DNA, 15 bp, Homo sapiens
gctgttggttgacca

SEQ ID NO: 82717 - DNA, 15 bp, Homo sapiens
ctgttggttgaccat

SEQ ID NO: 82718 - DNA, 15 bp, Homo sapiens
tgttggttgaccata

SEQ ID NO: 82719 - DNA, 15 bp, Homo sapiens
gttggttgaccatat

SEQ ID NO: 82720 - DNA, 15 bp, Homo sapiens
ttggttgaccatatt

SEQ ID NO: 82721 - DNA, 15 bp, Homo sapiens
tggttgaccatattt

SEQ ID NO: 82722 - DNA, 15 bp, Homo sapiens
ggttgaccatatttt

SEQ ID NO: 82723 - DNA, 15 bp, Homo sapiens
gttgaccatatttta

SEQ ID NO: 82724 - DNA, 15 bp, Homo sapiens
ttgaccatattttac

SEQ ID NO: 82725 - DNA, 15 bp, Homo sapiens
tgaccatattttact

SEQ ID NO: 82726 - DNA, 15 bp, Homo sapiens
gaccatattttactg

SEQ ID NO: 82727 - DNA, 15 bp, Homo sapiens
accatattttactga

SEQ ID NO: 82728 - DNA, 15 bp, Homo sapiens
ccatattttactgaa

SEQ ID NO: 82729 - DNA, 15 bp, Homo sapiens
catattttactgaac

SEQ ID NO: 82730 - DNA, 15 bp, Homo sapiens
atattttactgaaca

SEQ ID NO: 82731 - DNA, 15 bp, Homo sapiens
tattttactgaacag

SEQ ID NO: 82732 - DNA, 15 bp, Homo sapiens
attttactgaacagt

SEQ ID NO: 82733 - DNA, 15 bp, Homo sapiens
ttttactgaacagta

SEQ ID NO: 82734 - DNA, 15 bp, Homo sapiens
tttactgaacagtag

SEQ ID NO: 82735 - DNA, 15 bp, Homo sapiens
ttactgaacagtagc

SEQ ID NO: 82736 - DNA, 15 bp, Homo sapiens
tactgaacagtagca

SEQ ID NO: 82737 - DNA, 15 bp, Homo sapiens
actgaacagtagcat

SEQ ID NO: 82738 - DNA, 15 bp, Homo sapiens
ctgaacagtagcatt

SEQ ID NO: 82739 - DNA, 15 bp, Homo sapiens
tgaacagtagcattt

SEQ ID NO: 82740 - DNA, 15 bp, Homo sapiens
gaacagtagcatttg

SEQ ID NO: 82741 - DNA, 15 bp, Homo sapiens
aacagtagcatttgt

SEQ ID NO: 82742 - DNA, 15 bp, Homo sapiens
acagtagcatttgtg

SEQ ID NO: 82743 - DNA, 15 bp, Homo sapiens
cagtagcatttgtgt

SEQ ID NO: 82744 - DNA, 15 bp, Homo sapiens
agtagcatttgtgtt

SEQ ID NO: 82745 - DNA, 15 bp, Homo sapiens
gtagcatttgtgttt

SEQ ID NO: 82746 - DNA, 15 bp, Homo sapiens
tagcatttgtgttta

SEQ ID NO: 82747 - DNA, 15 bp, Homo sapiens
agcatttgtgtttag

SEQ ID NO: 82748 - DNA, 15 bp, Homo sapiens
gcatttgtgtttagg

SEQ ID NO: 82749 - DNA, 15 bp, Homo sapiens
catttgtgtttaggt

SEQ ID NO: 82750 - DNA, 15 bp, Homo sapiens
atttgtgtttaggtt

SEQ ID NO: 82751 - DNA, 15 bp, Homo sapiens
tttgtgtttaggttg

SEQ ID NO: 82752 - DNA, 15 bp, Homo sapiens
ttgtgtttaggttga

SEQ ID NO: 82753 - DNA, 15 bp, Homo sapiens
tgtgtttaggttgaa

SEQ ID NO: 82754 - DNA, 15 bp, Homo sapiens
gtgtttaggttgaaa

SEQ ID NO: 82755 - DNA, 15 bp, Homo sapiens
tgtttaggttgaaac

SEQ ID NO: 82756 - DNA, 15 bp, Homo sapiens
gtttaggttgaaaca

SEQ ID NO: 82757 - DNA, 15 bp, Homo sapiens
tttaggttgaaacag

SEQ ID NO: 82758 - DNA, 15 bp, Homo sapiens
ttaggttgaaacagc

SEQ ID NO: 82759 - DNA, 15 bp, Homo sapiens
taggttgaaacagca

SEQ ID NO: 82760 - DNA, 15 bp, Homo sapiens
aggttgaaacagcat

SEQ ID NO: 82761 - DNA, 15 bp, Homo sapiens
ggttgaaacagcatt

SEQ ID NO: 82762 - DNA, 15 bp, Homo sapiens
gttgaaacagcatta

SEQ ID NO: 82763 - DNA, 15 bp, Homo sapiens
ttgaaacagcattag

SEQ ID NO: 82764 - DNA, 15 bp, Homo sapiens
tgaaacagcattaga

SEQ ID NO: 82765 - DNA, 15 bp, Homo sapiens
gaaacagcattagaa

SEQ ID NO: 82766 - DNA, 15 bp, Homo sapiens
aaacagcattagaaa

SEQ ID NO: 82767 - DNA, 15 bp, Homo sapiens
aacagcattagaaaa

SEQ ID NO: 82768 - DNA, 15 bp, Homo sapiens
acagcattagaaaac

SEQ ID NO: 82769 - DNA, 15 bp, Homo sapiens
cagcattagaaaact

SEQ ID NO: 82770 - DNA, 15 bp, Homo sapiens
agcattagaaaacta

SEQ ID NO: 82771 - DNA, 15 bp, Homo sapiens
gcattagaaaactag

SEQ ID NO: 82772 - DNA, 15 bp, Homo sapiens
cattagaaaactaga

SEQ ID NO: 82773 - DNA, 15 bp, Homo sapiens
attagaaaactagat

SEQ ID NO: 82774 - DNA, 15 bp, Homo sapiens
ttagaaaactagata

SEQ ID NO: 82775 - DNA, 15 bp, Homo sapiens
tagaaaactagatac

SEQ ID NO: 82776 - DNA, 15 bp, Homo sapiens
agaaaactagatacg

SEQ ID NO: 82777 - DNA, 15 bp, Homo sapiens
gaaaactagatacgg

SEQ ID NO: 82778 - DNA, 15 bp, Homo sapiens
aaaactagatacgga

SEQ ID NO: 82779 - DNA, 15 bp, Homo sapiens
aaactagatacggat

SEQ ID NO: 82780 - DNA, 15 bp, Homo sapiens
aactagatacggatt

SEQ ID NO: 82781 - DNA, 15 bp, Homo sapiens
actagatacggatta

SEQ ID NO: 82782 - DNA, 15 bp, Homo sapiens
ctagatacggattaa

SEQ ID NO: 82783 - DNA, 15 bp, Homo sapiens
tagatacggattaaa

SEQ ID NO: 82784 - DNA, 15 bp, Homo sapiens
agatacggattaaag

SEQ ID NO: 82785 - DNA, 15 bp, Homo sapiens
gatacggattaaagt

SEQ ID NO: 82786 - DNA, 15 bp, Homo sapiens
atacggattaaagtc

SEQ ID NO: 82787 - DNA, 15 bp, Homo sapiens
tacggattaaagtca

SEQ ID NO: 82788 - DNA, 15 bp, Homo sapiens
acggattaaagtcag

SEQ ID NO: 82789 - DNA, 15 bp, Homo sapiens
cggattaaagtcagt

SEQ ID NO: 82790 - DNA, 15 bp, Homo sapiens
ggattaaagtcagtg

SEQ ID NO: 82791 - DNA, 15 bp, Homo sapiens
gattaaagtcagtgg

SEQ ID NO: 82792 - DNA, 15 bp, Homo sapiens
attaaagtcagtggt

SEQ ID NO: 82793 - DNA, 15 bp, Homo sapiens
ttaaagtcagtggta

SEQ ID NO: 82794 - DNA, 15 bp, Homo sapiens
taaagtcagtggtag

SEQ ID NO: 82795 - DNA, 15 bp, Homo sapiens
aaagtcagtggtagg

SEQ ID NO: 82796 - DNA, 15 bp, Homo sapiens
aagtcagtggtaggt

SEQ ID NO: 82797 - DNA, 15 bp, Homo sapiens
agtcagtggtaggtt

SEQ ID NO: 82798 - DNA, 15 bp, Homo sapiens
gtcagtggtaggttt

SEQ ID NO: 82799 - DNA, 15 bp, Homo sapiens
tcagtggtaggtttt

SEQ ID NO: 82800 - DNA, 15 bp, Homo sapiens
cagtggtaggttttt

SEQ ID NO: 82801 - DNA, 15 bp, Homo sapiens
agtggtaggtttttt

SEQ ID NO: 82802 - DNA, 15 bp, Homo sapiens
gtggtaggttttttt

SEQ ID NO: 82803 - DNA, 15 bp, Homo sapiens
tggtaggtttttttt

SEQ ID NO: 82804 - DNA, 15 bp, Homo sapiens
ggtaggttttttttt

SEQ ID NO: 82805 - DNA, 15 bp, Homo sapiens
gtaggtttttttttt

SEQ ID NO: 82806 - DNA, 15 bp, Homo sapiens
taggttttttttttt

SEQ ID NO: 82807 - DNA, 15 bp, Homo sapiens
aggtttttttttttt

SEQ ID NO: 82808 - DNA, 15 bp, Homo sapiens
ggttttttttttttt

SEQ ID NO: 82809 - DNA, 15 bp, Homo sapiens
ttttttttttttttc

SEQ ID NO: 82810 - DNA, 15 bp, Homo sapiens
tttttttttttttct

SEQ ID NO: 82811 - DNA, 15 bp, Homo sapiens
ttttttttttttctt

SEQ ID NO: 82812 - DNA, 15 bp, Homo sapiens
tttttttttttcttc

SEQ ID NO: 82813 - DNA, 15 bp, Homo sapiens
ttttttttttcttcc

SEQ ID NO: 82814 - DNA, 15 bp, Homo sapiens
tttttttttcttcca

SEQ ID NO: 82815 - DNA, 15 bp, Homo sapiens
ttttttttcttccag

SEQ ID NO: 82816 - DNA, 15 bp, Homo sapiens
tttttttcttccagg

SEQ ID NO: 82817 - DNA, 15 bp, Homo sapiens
ttttttcttccagga

SEQ ID NO: 82818 - DNA, 15 bp, Homo sapiens
tttttcttccaggaa

SEQ ID NO: 82819 - DNA, 15 bp, Homo sapiens
ttttcttccaggaat

SEQ ID NO: 82820 - DNA, 15 bp, Homo sapiens
tttcttccaggaatg

SEQ ID NO: 82821 - DNA, 15 bp, Homo sapiens
ttcttccaggaatgt

SEQ ID NO: 82822 - DNA, 15 bp, Homo sapiens
tcttccaggaatgtt

SEQ ID NO: 82823 - DNA, 15 bp, Homo sapiens
cttccaggaatgttt

SEQ ID NO: 82824 - DNA, 15 bp, Homo sapiens
ttccaggaatgtttc

SEQ ID NO: 82825 - DNA, 15 bp, Homo sapiens
tccaggaatgtttct

SEQ ID NO: 82826 - DNA, 15 bp, Homo sapiens
ccaggaatgtttctt

SEQ ID NO: 82827 - DNA, 15 bp, Homo sapiens
caggaatgtttctta

SEQ ID NO: 82828 - DNA, 15 bp, Homo sapiens
aggaatgtttcttat

SEQ ID NO: 82829 - DNA, 15 bp, Homo sapiens
ggaatgtttcttata

SEQ ID NO: 82830 - DNA, 15 bp, Homo sapiens
gaatgtttcttatag

SEQ ID NO: 82831 - DNA, 15 bp, Homo sapiens
aatgtttcttataga

SEQ ID NO: 82832 - DNA, 15 bp, Homo sapiens
atgtttcttatagat

SEQ ID NO: 82833 - DNA, 15 bp, Homo sapiens
tgtttcttatagatg

SEQ ID NO: 82834 - DNA, 15 bp, Homo sapiens
gtttcttatagatga

SEQ ID NO: 82835 - DNA, 15 bp, Homo sapiens
tttcttatagatgat

SEQ ID NO: 82836 - DNA, 15 bp, Homo sapiens
ttcttatagatgatc

SEQ ID NO: 82837 - DNA, 15 bp, Homo sapiens
tcttatagatgatca

SEQ ID NO: 82838 - DNA, 15 bp, Homo sapiens
cttatagatgatcaa

SEQ ID NO: 82839 - DNA, 15 bp, Homo sapiens
ttatagatgatcaaa

SEQ ID NO: 82840 - DNA, 15 bp, Homo sapiens
tatagatgatcaaac

SEQ ID NO: 82841 - DNA, 15 bp, Homo sapiens
atagatgatcaaaca

SEQ ID NO: 82842 - DNA, 15 bp, Homo sapiens
tagatgatcaaacag

SEQ ID NO: 82843 - DNA, 15 bp, Homo sapiens
agatgatcaaacagg

SEQ ID NO: 82844 - DNA, 15 bp, Homo sapiens
gatgatcaaacaggc

SEQ ID NO: 82845 - DNA, 15 bp, Homo sapiens
atgatcaaacaggca

SEQ ID NO: 82846 - DNA, 15 bp, Homo sapiens
tgatcaaacaggcac

SEQ ID NO: 82847 - DNA, 15 bp, Homo sapiens
gatcaaacaggcaca

SEQ ID NO: 82848 - DNA, 15 bp, Homo sapiens
atcaaacaggcacag

SEQ ID NO: 82849 - DNA, 15 bp, Homo sapiens
tcaaacaggcacagg

SEQ ID NO: 82850 - DNA, 15 bp, Homo sapiens
caaacaggcacagga

SEQ ID NO: 82851 - DNA, 15 bp, Homo sapiens
aaacaggcacaggaa

SEQ ID NO: 82852 - DNA, 15 bp, Homo sapiens
aacaggcacaggaag

SEQ ID NO: 82853 - DNA, 15 bp, Homo sapiens
acaggcacaggaagg

SEQ ID NO: 82854 - DNA, 15 bp, Homo sapiens
caggcacaggaaggg

SEQ ID NO: 82855 - DNA, 15 bp, Homo sapiens
aggcacaggaagggg

SEQ ID NO: 82856 - DNA, 15 bp, Homo sapiens
ggcacaggaagggga

SEQ ID NO: 82857 - DNA, 15 bp, Homo sapiens
gcacaggaaggggaa

SEQ ID NO: 82858 - DNA, 15 bp, Homo sapiens
cacaggaaggggaag

SEQ ID NO: 82859 - DNA, 15 bp, Homo sapiens
acaggaaggggaagt

SEQ ID NO: 82860 - DNA, 15 bp, Homo sapiens
caggaaggggaagtg

SEQ ID NO: 82861 - DNA, 15 bp, Homo sapiens
aggaaggggaagtgt

SEQ ID NO: 82862 - DNA, 15 bp, Homo sapiens
ggaaggggaagtgtt

SEQ ID NO: 82863 - DNA, 15 bp, Homo sapiens
gaaggggaagtgttg

SEQ ID NO: 82864 - DNA, 15 bp, Homo sapiens
aaggggaagtgttgt

SEQ ID NO: 82865 - DNA, 15 bp, Homo sapiens
aggggaagtgttgtg

SEQ ID NO: 82866 - DNA, 15 bp, Homo sapiens
ggggaagtgttgtga

SEQ ID NO: 82867 - DNA, 15 bp, Homo sapiens
gggaagtgttgtgat

SEQ ID NO: 82868 - DNA, 15 bp, Homo sapiens
ggaagtgttgtgatc

SEQ ID NO: 82869 - DNA, 15 bp, Homo sapiens
gaagtgttgtgatca

SEQ ID NO: 82870 - DNA, 15 bp, Homo sapiens
aagtgttgtgatcaa

SEQ ID NO: 82871 - DNA, 15 bp, Homo sapiens
agtgttgtgatcaat

SEQ ID NO: 82872 - DNA, 15 bp, Homo sapiens
gtgttgtgatcaata

SEQ ID NO: 82873 - DNA, 15 bp, Homo sapiens
tgttgtgatcaatat

SEQ ID NO: 82874 - DNA, 15 bp, Homo sapiens
gttgtgatcaatatt

SEQ ID NO: 82875 - DNA, 15 bp, Homo sapiens
ttgtgatcaatatta

SEQ ID NO: 82876 - DNA, 15 bp, Homo sapiens
tgtgatcaatattat

SEQ ID NO: 82877 - DNA, 15 bp, Homo sapiens
gtgatcaatattatc

SEQ ID NO: 82878 - DNA, 15 bp, Homo sapiens
tgatcaatattatcc

SEQ ID NO: 82879 - DNA, 15 bp, Homo sapiens
gatcaatattatcca

SEQ ID NO: 82880 - DNA, 15 bp, Homo sapiens
atcaatattatccag

SEQ ID NO: 82881 - DNA, 15 bp, Homo sapiens
tcaatattatccagt

SEQ ID NO: 82882 - DNA, 15 bp, Homo sapiens
caatattatccagtt

SEQ ID NO: 82883 - DNA, 15 bp, Homo sapiens
aatattatccagtta

SEQ ID NO: 82884 - DNA, 15 bp, Homo sapiens
atattatccagttaa

SEQ ID NO: 82885 - DNA, 15 bp, Homo sapiens
tattatccagttaat

SEQ ID NO: 82886 - DNA, 15 bp, Homo sapiens
attatccagttaata

SEQ ID NO: 82887 - DNA, 15 bp, Homo sapiens
ttatccagttaatat

SEQ ID NO: 82888 - DNA, 15 bp, Homo sapiens
tatccagttaatatt

SEQ ID NO: 82889 - DNA, 15 bp, Homo sapiens
atccagttaatatta

SEQ ID NO: 82890 - DNA, 15 bp, Homo sapiens
tccagttaatattag

SEQ ID NO: 82891 - DNA, 15 bp, Homo sapiens
ccagttaatattagc

SEQ ID NO: 82892 - DNA, 15 bp, Homo sapiens
cagttaatattagca

SEQ ID NO: 82893 - DNA, 15 bp, Homo sapiens
agttaatattagcat

SEQ ID NO: 82894 - DNA, 15 bp, Homo sapiens
gttaatattagcatt

SEQ ID NO: 82895 - DNA, 15 bp, Homo sapiens
ttaatattagcattc

SEQ ID NO: 82896 - DNA, 15 bp, Homo sapiens
taatattagcattca

SEQ ID NO: 82897 - DNA, 15 bp, Homo sapiens
aatattagcattcag

SEQ ID NO: 82898 - DNA, 15 bp, Homo sapiens
atattagcattcaga

SEQ ID NO: 82899 - DNA, 15 bp, Homo sapiens
tattagcattcagag

SEQ ID NO: 82900 - DNA, 15 bp, Homo sapiens
attagcattcagagg

SEQ ID NO: 82901 - DNA, 15 bp, Homo sapiens
ttagcattcagagga

SEQ ID NO: 82902 - DNA, 15 bp, Homo sapiens
tagcattcagaggaa

SEQ ID NO: 82903 - DNA, 15 bp, Homo sapiens
agcattcagaggaaa

SEQ ID NO: 82904 - DNA, 15 bp, Homo sapiens
gcattcagaggaaaa

SEQ ID NO: 82905 - DNA, 15 bp, Homo sapiens
cattcagaggaaaat

SEQ ID NO: 82906 - DNA, 15 bp, Homo sapiens
attcagaggaaaatt

SEQ ID NO: 82907 - DNA, 15 bp, Homo sapiens
ttcagaggaaaattt

SEQ ID NO: 82908 - DNA, 15 bp, Homo sapiens
tcagaggaaaatttg

SEQ ID NO: 82909 - DNA, 15 bp, Homo sapiens
cagaggaaaatttga

SEQ ID NO: 82910 - DNA, 15 bp, Homo sapiens
agaggaaaatttgag

SEQ ID NO: 82911 - DNA, 15 bp, Homo sapiens
gaggaaaatttgagt

SEQ ID NO: 82912 - DNA, 15 bp, Homo sapiens
aggaaaatttgagtc

SEQ ID NO: 82913 - DNA, 15 bp, Homo sapiens
ggaaaatttgagtcc

SEQ ID NO: 82914 - DNA, 15 bp, Homo sapiens
gaaaatttgagtcct

SEQ ID NO: 82915 - DNA, 15 bp, Homo sapiens
aaaatttgagtcctc

SEQ ID NO: 82916 - DNA, 15 bp, Homo sapiens
aaatttgagtcctct

SEQ ID NO: 82917 - DNA, 15 bp, Homo sapiens
aatttgagtcctctg

SEQ ID NO: 82918 - DNA, 15 bp, Homo sapiens
atttgagtcctctga

SEQ ID NO: 82919 - DNA, 15 bp, Homo sapiens
tttgagtcctctgat

SEQ ID NO: 82920 - DNA, 15 bp, Homo sapiens
ttgagtcctctgata

SEQ ID NO: 82921 - DNA, 15 bp, Homo sapiens
tgagtcctctgatac

SEQ ID NO: 82922 - DNA, 15 bp, Homo sapiens
gagtcctctgataca

SEQ ID NO: 82923 - DNA, 15 bp, Homo sapiens
agtcctctgatacac

SEQ ID NO: 82924 - DNA, 15 bp, Homo sapiens
gtcctctgatacact

SEQ ID NO: 82925 - DNA, 15 bp, Homo sapiens
tcctctgatacactg

SEQ ID NO: 82926 - DNA, 15 bp, Homo sapiens
cctctgatacactgt

SEQ ID NO: 82927 - DNA, 15 bp, Homo sapiens
ctctgatacactgtt

SEQ ID NO: 82928 - DNA, 15 bp, Homo sapiens
tctgatacactgtta

SEQ ID NO: 82929 - DNA, 15 bp, Homo sapiens
ctgatacactgttaa

SEQ ID NO: 82930 - DNA, 15 bp, Homo sapiens
tgatacactgttaaa

SEQ ID NO: 82931 - DNA, 15 bp, Homo sapiens
gatacactgttaaat

SEQ ID NO: 82932 - DNA, 15 bp, Homo sapiens
atacactgttaaatt

SEQ ID NO: 82933 - DNA, 15 bp, Homo sapiens
tacactgttaaattt

SEQ ID NO: 82934 - DNA, 15 bp, Homo sapiens
acactgttaaatttc

SEQ ID NO: 82935 - DNA, 15 bp, Homo sapiens
cactgttaaatttct

SEQ ID NO: 82936 - DNA, 15 bp, Homo sapiens
actgttaaatttctt

SEQ ID NO: 82937 - DNA, 15 bp, Homo sapiens
ctgttaaatttcttt

SEQ ID NO: 82938 - DNA, 15 bp, Homo sapiens
tgttaaatttctttc

SEQ ID NO: 82939 - DNA, 15 bp, Homo sapiens
gttaaatttctttct

SEQ ID NO: 82940 - DNA, 15 bp, Homo sapiens
ttaaatttctttcta

SEQ ID NO: 82941 - DNA, 15 bp, Homo sapiens
taaatttctttctat

SEQ ID NO: 82942 - DNA, 15 bp, Homo sapiens
aaatttctttctata

SEQ ID NO: 82943 - DNA, 15 bp, Homo sapiens
aatttctttctatac

SEQ ID NO: 82944 - DNA, 15 bp, Homo sapiens
atttctttctatact

SEQ ID NO: 82945 - DNA, 15 bp, Homo sapiens
tttctttctatacta

SEQ ID NO: 82946 - DNA, 15 bp, Homo sapiens
ttctttctatactat

SEQ ID NO: 82947 - DNA, 15 bp, Homo sapiens
tctttctatactatc

SEQ ID NO: 82948 - DNA, 15 bp, Homo sapiens
ctttctatactatca

SEQ ID NO: 82949 - DNA, 15 bp, Homo sapiens
tttctatactatcaa

SEQ ID NO: 82950 - DNA, 15 bp, Homo sapiens
ttctatactatcaag

SEQ ID NO: 82951 - DNA, 15 bp, Homo sapiens
tctatactatcaagt

SEQ ID NO: 82952 - DNA, 15 bp, Homo sapiens
ctatactatcaagtc

SEQ ID NO: 82953 - DNA, 15 bp, Homo sapiens
tatactatcaagtcc

SEQ ID NO: 82954 - DNA, 15 bp, Homo sapiens
atactatcaagtcca

SEQ ID NO: 82955 - DNA, 15 bp, Homo sapiens
tactatcaagtccac

SEQ ID NO: 82956 - DNA, 15 bp, Homo sapiens
actatcaagtccaca

SEQ ID NO: 82957 - DNA, 15 bp, Homo sapiens
ctatcaagtccacaa

SEQ ID NO: 82958 - DNA, 15 bp, Homo sapiens
tatcaagtccacaaa

SEQ ID NO: 82959 - DNA, 15 bp, Homo sapiens
atcaagtccacaaat

SEQ ID NO: 82960 - DNA, 15 bp, Homo sapiens
tcaagtccacaaatc

SEQ ID NO: 82961 - DNA, 15 bp, Homo sapiens
caagtccacaaatcc

SEQ ID NO: 82962 - DNA, 15 bp, Homo sapiens
aagtccacaaatcct

SEQ ID NO: 82963 - DNA, 15 bp, Homo sapiens
agtccacaaatcctg

SEQ ID NO: 82964 - DNA, 15 bp, Homo sapiens
gtccacaaatcctgg

SEQ ID NO: 82965 - DNA, 15 bp, Homo sapiens
tccacaaatcctgga

SEQ ID NO: 82966 - DNA, 15 bp, Homo sapiens
ccacaaatcctggaa

SEQ ID NO: 82967 - DNA, 15 bp, Homo sapiens
cacaaatcctggaac

SEQ ID NO: 82968 - DNA, 15 bp, Homo sapiens
acaaatcctggaact

SEQ ID NO: 82969 - DNA, 15 bp, Homo sapiens
caaatcctggaactg

SEQ ID NO: 82970 - DNA, 15 bp, Homo sapiens
aaatcctggaactgc

SEQ ID NO: 82971 - DNA, 15 bp, Homo sapiens
aatcctggaactgca

SEQ ID NO: 82972 - DNA, 15 bp, Homo sapiens
atcctggaactgcaa

SEQ ID NO: 82973 - DNA, 15 bp, Homo sapiens
tcctggaactgcaaa

SEQ ID NO: 82974 - DNA, 15 bp, Homo sapiens
cctggaactgcaaaa

SEQ ID NO: 82975 - DNA, 15 bp, Homo sapiens
ctggaactgcaaaag

SEQ ID NO: 82976 - DNA, 15 bp, Homo sapiens
tggaactgcaaaaga

SEQ ID NO: 82977 - DNA, 15 bp, Homo sapiens
ggaactgcaaaagaa

SEQ ID NO: 82978 - DNA, 15 bp, Homo sapiens
gaactgcaaaagaat

SEQ ID NO: 82979 - DNA, 15 bp, Homo sapiens
aactgcaaaagaatt

SEQ ID NO: 82980 - DNA, 15 bp, Homo sapiens
actgcaaaagaattt

SEQ ID NO: 82981 - DNA, 15 bp, Homo sapiens
ctgcaaaagaatttt

SEQ ID NO: 82982 - DNA, 15 bp, Homo sapiens
tgcaaaagaattttg

SEQ ID NO: 82983 - DNA, 15 bp, Homo sapiens
gcaaaagaattttga

SEQ ID NO: 82984 - DNA, 15 bp, Homo sapiens
caaaagaattttgag

SEQ ID NO: 82985 - DNA, 15 bp, Homo sapiens
aaaagaattttgaga

SEQ ID NO: 82986 - DNA, 15 bp, Homo sapiens
aaagaattttgagac

SEQ ID NO: 82987 - DNA, 15 bp, Homo sapiens
aagaattttgagact

SEQ ID NO: 82988 - DNA, 15 bp, Homo sapiens
agaattttgagactg

SEQ ID NO: 82989 - DNA, 15 bp, Homo sapiens
gaattttgagactgt

SEQ ID NO: 82990 - DNA, 15 bp, Homo sapiens
aattttgagactgtt

SEQ ID NO: 82991 - DNA, 15 bp, Homo sapiens
attttgagactgttc

SEQ ID NO: 82992 - DNA, 15 bp, Homo sapiens
ttttgagactgttca

SEQ ID NO: 82993 - DNA, 15 bp, Homo sapiens
tttgagactgttcaa

SEQ ID NO: 82994 - DNA, 15 bp, Homo sapiens
ttgagactgttcaaa

SEQ ID NO: 82995 - DNA, 15 bp, Homo sapiens
tgagactgttcaaaa

SEQ ID NO: 82996 - DNA, 15 bp, Homo sapiens
gagactgttcaaaat

SEQ ID NO: 82997 - DNA, 15 bp, Homo sapiens
agactgttcaaaata

SEQ ID NO: 82998 - DNA, 15 bp, Homo sapiens
gactgttcaaaataa

SEQ ID NO: 82999 - DNA, 15 bp, Homo sapiens
actgttcaaaataat

SEQ ID NO: 83000 - DNA, 15 bp, Homo sapiens
ctgttcaaaataatt

SEQ ID NO: 83001 - DNA, 15 bp, Homo sapiens
tgttcaaaataatta

SEQ ID NO: 83002 - DNA, 15 bp, Homo sapiens
gttcaaaataattaa

SEQ ID NO: 83003 - DNA, 15 bp, Homo sapiens
ttcaaaataattaat

SEQ ID NO: 83004 - DNA, 15 bp, Homo sapiens
tcaaaataattaatc

SEQ ID NO: 83005 - DNA, 15 bp, Homo sapiens
caaaataattaatct

SEQ ID NO: 83006 - DNA, 15 bp, Homo sapiens
aaaataattaatctc

SEQ ID NO: 83007 - DNA, 15 bp, Homo sapiens
aaataattaatctct

SEQ ID NO: 83008 - DNA, 15 bp, Homo sapiens
aataattaatctctg

SEQ ID NO: 83009 - DNA, 15 bp, Homo sapiens
ataattaatctctgt

SEQ ID NO: 83010 - DNA, 15 bp, Homo sapiens
taattaatctctgta

SEQ ID NO: 83011 - DNA, 15 bp, Homo sapiens
aattaatctctgtat

SEQ ID NO: 83012 - DNA, 15 bp, Homo sapiens
attaatctctgtata

SEQ ID NO: 83013 - DNA, 15 bp, Homo sapiens
ttaatctctgtatag

SEQ ID NO: 83014 - DNA, 15 bp, Homo sapiens
taatctctgtatagg

SEQ ID NO: 83015 - DNA, 15 bp, Homo sapiens
aatctctgtataggc

SEQ ID NO: 83016 - DNA, 15 bp, Homo sapiens
atctctgtataggct

SEQ ID NO: 83017 - DNA, 15 bp, Homo sapiens
tctctgtataggctc

SEQ ID NO: 83018 - DNA, 15 bp, Homo sapiens
ctctgtataggctca

SEQ ID NO: 83019 - DNA, 15 bp, Homo sapiens
tctgtataggctcag

SEQ ID NO: 83020 - DNA, 15 bp, Homo sapiens
ctgtataggctcagg

SEQ ID NO: 83021 - DNA, 15 bp, Homo sapiens
tgtataggctcaggc

SEQ ID NO: 83022 - DNA, 15 bp, Homo sapiens
gtataggctcaggct

SEQ ID NO: 83023 - DNA, 15 bp, Homo sapiens
tataggctcaggctt

SEQ ID NO: 83024 - DNA, 15 bp, Homo sapiens
ataggctcaggcttt

SEQ ID NO: 83025 - DNA, 15 bp, Homo sapiens
taggctcaggctttc

SEQ ID NO: 83026 - DNA, 15 bp, Homo sapiens
aggctcaggctttcc

SEQ ID NO: 83027 - DNA, 15 bp, Homo sapiens
ggctcaggctttcct

SEQ ID NO: 83028 - DNA, 15 bp, Homo sapiens
gctcaggctttcctg

SEQ ID NO: 83029 - DNA, 15 bp, Homo sapiens
ctcaggctttcctgc

SEQ ID NO: 83030 - DNA, 15 bp, Homo sapiens
tcaggctttcctgca

SEQ ID NO: 83031 - DNA, 15 bp, Homo sapiens
caggctttcctgcaa

SEQ ID NO: 83032 - DNA, 15 bp, Homo sapiens
aggctttcctgcaag

SEQ ID NO: 83033 - DNA, 15 bp, Homo sapiens
ggctttcctgcaagg

SEQ ID NO: 83034 - DNA, 15 bp, Homo sapiens
gctttcctgcaaggt

SEQ ID NO: 83035 - DNA, 15 bp, Homo sapiens
ctttcctgcaaggtt

SEQ ID NO: 83036 - DNA, 15 bp, Homo sapiens
tttcctgcaaggtta

SEQ ID NO: 83037 - DNA, 15 bp, Homo sapiens
ttcctgcaaggttat

SEQ ID NO: 83038 - DNA, 15 bp, Homo sapiens
tcctgcaaggttatg

SEQ ID NO: 83039 - DNA, 15 bp, Homo sapiens
cctgcaaggttatga

SEQ ID NO: 83040 - DNA, 15 bp, Homo sapiens
ctgcaaggttatgaa

SEQ ID NO: 83041 - DNA, 15 bp, Homo sapiens
tgcaaggttatgaaa

SEQ ID NO: 83042 - DNA, 15 bp, Homo sapiens
gcaaggttatgaaat

SEQ ID NO: 83043 - DNA, 15 bp, Homo sapiens
caaggttatgaaatg

SEQ ID NO: 83044 - DNA, 15 bp, Homo sapiens
aaggttatgaaatgc

SEQ ID NO: 83045 - DNA, 15 bp, Homo sapiens
aggttatgaaatgct

SEQ ID NO: 83046 - DNA, 15 bp, Homo sapiens
ggttatgaaatgctg

SEQ ID NO: 83047 - DNA, 15 bp, Homo sapiens
gttatgaaatgctga

SEQ ID NO: 83048 - DNA, 15 bp, Homo sapiens
ttatgaaatgctgat

SEQ ID NO: 83049 - DNA, 15 bp, Homo sapiens
tatgaaatgctgata

SEQ ID NO: 83050 - DNA, 15 bp, Homo sapiens
atgaaatgctgataa

SEQ ID NO: 83051 - DNA, 15 bp, Homo sapiens
tgaaatgctgataaa

SEQ ID NO: 83052 - DNA, 15 bp, Homo sapiens
gaaatgctgataaaa

SEQ ID NO: 83053 - DNA, 15 bp, Homo sapiens
aaatgctgataaaat

SEQ ID NO: 83054 - DNA, 15 bp, Homo sapiens
aatgctgataaaatt

SEQ ID NO: 83055 - DNA, 15 bp, Homo sapiens
atgctgataaaattg

SEQ ID NO: 83056 - DNA, 15 bp, Homo sapiens
tgctgataaaattgg

SEQ ID NO: 83057 - DNA, 15 bp, Homo sapiens
gctgataaaattggt

SEQ ID NO: 83058 - DNA, 15 bp, Homo sapiens
ctgataaaattggtc

SEQ ID NO: 83059 - DNA, 15 bp, Homo sapiens
tgataaaattggtct

SEQ ID NO: 83060 - DNA, 15 bp, Homo sapiens
gataaaattggtctt

SEQ ID NO: 83061 - DNA, 15 bp, Homo sapiens
ataaaattggtctta

SEQ ID NO: 83062 - DNA, 15 bp, Homo sapiens
taaaattggtcttat

SEQ ID NO: 83063 - DNA, 15 bp, Homo sapiens
aaaattggtcttatt

SEQ ID NO: 83064 - DNA, 15 bp, Homo sapiens
aaattggtcttattt

SEQ ID NO: 83065 - DNA, 15 bp, Homo sapiens
aattggtcttatttt

SEQ ID NO: 83066 - DNA, 15 bp, Homo sapiens
attggtcttattttg

SEQ ID NO: 83067 - DNA, 15 bp, Homo sapiens
ttggtcttattttga

SEQ ID NO: 83068 - DNA, 15 bp, Homo sapiens
tggtcttattttgaa

SEQ ID NO: 83069 - DNA, 15 bp, Homo sapiens
ggtcttattttgaaa

SEQ ID NO: 83070 - DNA, 15 bp, Homo sapiens
gtcttattttgaaag

SEQ ID NO: 83071 - DNA, 15 bp, Homo sapiens
tcttattttgaaagg

SEQ ID NO: 83072 - DNA, 15 bp, Homo sapiens
cttattttgaaaggc

SEQ ID NO: 83073 - DNA, 15 bp, Homo sapiens
ttattttgaaaggct

SEQ ID NO: 83074 - DNA, 15 bp, Homo sapiens
tattttgaaaggctc

SEQ ID NO: 83075 - DNA, 15 bp, Homo sapiens
attttgaaaggctcc

SEQ ID NO: 83076 - DNA, 15 bp, Homo sapiens
ttttgaaaggctcct

SEQ ID NO: 83077 - DNA, 15 bp, Homo sapiens
tttgaaaggctcctc

SEQ ID NO: 83078 - DNA, 15 bp, Homo sapiens
ttgaaaggctcctca

SEQ ID NO: 83079 - DNA, 15 bp, Homo sapiens
tgaaaggctcctcag

SEQ ID NO: 83080 - DNA, 15 bp, Homo sapiens
gaaaggctcctcagc

SEQ ID NO: 83081 - DNA, 15 bp, Homo sapiens
aaaggctcctcagct

SEQ ID NO: 83082 - DNA, 15 bp, Homo sapiens
aaggctcctcagctt

SEQ ID NO: 83083 - DNA, 15 bp, Homo sapiens
aggctcctcagctta

SEQ ID NO: 83084 - DNA, 15 bp, Homo sapiens
ggctcctcagcttat

SEQ ID NO: 83085 - DNA, 15 bp, Homo sapiens
gctcctcagcttata

SEQ ID NO: 83086 - DNA, 15 bp, Homo sapiens
ctcctcagcttatac

SEQ ID NO: 83087 - DNA, 15 bp, Homo sapiens
tcctcagcttatacc

SEQ ID NO: 83088 - DNA, 15 bp, Homo sapiens
cctcagcttatacct

SEQ ID NO: 83089 - DNA, 15 bp, Homo sapiens
ctcagcttatacctt

SEQ ID NO: 83090 - DNA, 15 bp, Homo sapiens
tcagcttataccttt

SEQ ID NO: 83091 - DNA, 15 bp, Homo sapiens
cagcttatacctttc

SEQ ID NO: 83092 - DNA, 15 bp, Homo sapiens
agcttatacctttcc

SEQ ID NO: 83093 - DNA, 15 bp, Homo sapiens
gcttatacctttcct

SEQ ID NO: 83094 - DNA, 15 bp, Homo sapiens
cttatacctttcctt

SEQ ID NO: 83095 - DNA, 15 bp, Homo sapiens
ttatacctttcctta

SEQ ID NO: 83096 - DNA, 15 bp, Homo sapiens
tatacctttccttac

SEQ ID NO: 83097 - DNA, 15 bp, Homo sapiens
atacctttccttaca

SEQ ID NO: 83098 - DNA, 15 bp, Homo sapiens
tacctttccttacaa

SEQ ID NO: 83099 - DNA, 15 bp, Homo sapiens
acctttccttacaaa

SEQ ID NO: 83100 - DNA, 15 bp, Homo sapiens
cctttccttacaaat

SEQ ID NO: 83101 - DNA, 15 bp, Homo sapiens
ctttccttacaaatg

SEQ ID NO: 83102 - DNA, 15 bp, Homo sapiens
tttccttacaaatgc

SEQ ID NO: 83103 - DNA, 15 bp, Homo sapiens
ttccttacaaatgct

SEQ ID NO: 83104 - DNA, 15 bp, Homo sapiens
tccttacaaatgctt

SEQ ID NO: 83105 - DNA, 15 bp, Homo sapiens
ccttacaaatgcttc

SEQ ID NO: 83106 - DNA, 15 bp, Homo sapiens
cttacaaatgcttcc

SEQ ID NO: 83107 - DNA, 15 bp, Homo sapiens
ttacaaatgcttcct

SEQ ID NO: 83108 - DNA, 15 bp, Homo sapiens
tacaaatgcttcctt

SEQ ID NO: 83109 - DNA, 15 bp, Homo sapiens
acaaatgcttcctta

SEQ ID NO: 83110 - DNA, 15 bp, Homo sapiens
caaatgcttccttac

SEQ ID NO: 83111 - DNA, 15 bp, Homo sapiens
aaatgcttccttaca

SEQ ID NO: 83112 - DNA, 15 bp, Homo sapiens
aatgcttccttacaa

SEQ ID NO: 83113 - DNA, 15 bp, Homo sapiens
atgcttccttacaaa

SEQ ID NO: 83114 - DNA, 15 bp, Homo sapiens
tgcttccttacaaat

SEQ ID NO: 83115 - DNA, 15 bp, Homo sapiens
gcttccttacaaatg

SEQ ID NO: 83116 - DNA, 15 bp, Homo sapiens
cttccttacaaatgc

SEQ ID NO: 83117 - DNA, 15 bp, Homo sapiens
tccttacaaatgcta

SEQ ID NO: 83118 - DNA, 15 bp, Homo sapiens
ccttacaaatgctaa

SEQ ID NO: 83119 - DNA, 15 bp, Homo sapiens
cttacaaatgctaaa

SEQ ID NO: 83120 - DNA, 15 bp, Homo sapiens
ttacaaatgctaaag

SEQ ID NO: 83121 - DNA, 15 bp, Homo sapiens
tacaaatgctaaagc

SEQ ID NO: 83122 - DNA, 15 bp, Homo sapiens
acaaatgctaaagca

SEQ ID NO: 83123 - DNA, 15 bp, Homo sapiens
caaatgctaaagcat

SEQ ID NO: 83124 - DNA, 15 bp, Homo sapiens
aaatgctaaagcatt

SEQ ID NO: 83125 - DNA, 15 bp, Homo sapiens
aatgctaaagcattt

SEQ ID NO: 83126 - DNA, 15 bp, Homo sapiens
atgctaaagcattta

SEQ ID NO: 83127 - DNA, 15 bp, Homo sapiens
tgctaaagcatttaa

SEQ ID NO: 83128 - DNA, 15 bp, Homo sapiens
gctaaagcatttaat

SEQ ID NO: 83129 - DNA, 15 bp, Homo sapiens
ctaaagcatttaatg

SEQ ID NO: 83130 - DNA, 15 bp, Homo sapiens
taaagcatttaatga

SEQ ID NO: 83131 - DNA, 15 bp, Homo sapiens
aaagcatttaatgac

SEQ ID NO: 83132 - DNA, 15 bp, Homo sapiens
aagcatttaatgact

SEQ ID NO: 83133 - DNA, 15 bp, Homo sapiens
agcatttaatgactc

SEQ ID NO: 83134 - DNA, 15 bp, Homo sapiens
gcatttaatgactcc

SEQ ID NO: 83135 - DNA, 15 bp, Homo sapiens
catttaatgactcct

SEQ ID NO: 83136 - DNA, 15 bp, Homo sapiens
atttaatgactcctg

SEQ ID NO: 83137 - DNA, 15 bp, Homo sapiens
tttaatgactcctga

SEQ ID NO: 83138 - DNA, 15 bp, Homo sapiens
ttaatgactcctgac

SEQ ID NO: 83139 - DNA, 15 bp, Homo sapiens
taatgactcctgact

SEQ ID NO: 83140 - DNA, 15 bp, Homo sapiens
aatgactcctgactt

SEQ ID NO: 83141 - DNA, 15 bp, Homo sapiens
atgactcctgactta

SEQ ID NO: 83142 - DNA, 15 bp, Homo sapiens
tgactcctgacttaa

SEQ ID NO: 83143 - DNA, 15 bp, Homo sapiens
gactcctgacttaaa

SEQ ID NO: 83144 - DNA, 15 bp, Homo sapiens
actcctgacttaaag

SEQ ID NO: 83145 - DNA, 15 bp, Homo sapiens
ctcctgacttaaagg

SEQ ID NO: 83146 - DNA, 15 bp, Homo sapiens
tcctgacttaaaggg

SEQ ID NO: 83147 - DNA, 15 bp, Homo sapiens
cctgacttaaaggga

SEQ ID NO: 83148 - DNA, 15 bp, Homo sapiens
ctgacttaaagggaa

SEQ ID NO: 83149 - DNA, 15 bp, Homo sapiens
tgacttaaagggaat

SEQ ID NO: 83150 - DNA, 15 bp, Homo sapiens
gacttaaagggaatt

SEQ ID NO: 83151 - DNA, 15 bp, Homo sapiens
acttaaagggaattt

SEQ ID NO: 83152 - DNA, 15 bp, Homo sapiens
cttaaagggaatttg

SEQ ID NO: 83153 - DNA, 15 bp, Homo sapiens
ttaaagggaatttgg

SEQ ID NO: 83154 - DNA, 15 bp, Homo sapiens
taaagggaatttgga

SEQ ID NO: 83155 - DNA, 15 bp, Homo sapiens
aaagggaatttggac

SEQ ID NO: 83156 - DNA, 15 bp, Homo sapiens
aagggaatttggaca

SEQ ID NO: 83157 - DNA, 15 bp, Homo sapiens
agggaatttggacag

SEQ ID NO: 83158 - DNA, 15 bp, Homo sapiens
gggaatttggacaga

SEQ ID NO: 83159 - DNA, 15 bp, Homo sapiens
ggaatttggacagat

SEQ ID NO: 83160 - DNA, 15 bp, Homo sapiens
gaatttggacagatt

SEQ ID NO: 83161 - DNA, 15 bp, Homo sapiens
aatttggacagattg

SEQ ID NO: 83162 - DNA, 15 bp, Homo sapiens
atttggacagattga

SEQ ID NO: 83163 - DNA, 15 bp, Homo sapiens
tttggacagattgag

SEQ ID NO: 83164 - DNA, 15 bp, Homo sapiens
ttggacagattgagg

SEQ ID NO: 83165 - DNA, 15 bp, Homo sapiens
tggacagattgaggt

SEQ ID NO: 83166 - DNA, 15 bp, Homo sapiens
ggacagattgaggtt

SEQ ID NO: 83167 - DNA, 15 bp, Homo sapiens
gacagattgaggttg

SEQ ID NO: 83168 - DNA, 15 bp, Homo sapiens
acagattgaggttgt

SEQ ID NO: 83169 - DNA, 15 bp, Homo sapiens
cagattgaggttgtt

SEQ ID NO: 83170 - DNA, 15 bp, Homo sapiens
agattgaggttgttg

SEQ ID NO: 83171 - DNA, 15 bp, Homo sapiens
gattgaggttgttgg

SEQ ID NO: 83172 - DNA, 15 bp, Homo sapiens
attgaggttgttggt

SEQ ID NO: 83173 - DNA, 15 bp, Homo sapiens
ttgaggttgttggtc

SEQ ID NO: 83174 - DNA, 15 bp, Homo sapiens
tgaggttgttggtct

SEQ ID NO: 83175 - DNA, 15 bp, Homo sapiens
gaggttgttggtctt

SEQ ID NO: 83176 - DNA, 15 bp, Homo sapiens
aggttgttggtcttg

SEQ ID NO: 83177 - DNA, 15 bp, Homo sapiens
ggttgttggtcttgg

SEQ ID NO: 83178 - DNA, 15 bp, Homo sapiens
gttgttggtcttgga

SEQ ID NO: 83179 - DNA, 15 bp, Homo sapiens
ttgttggtcttggaa

SEQ ID NO: 83180 - DNA, 15 bp, Homo sapiens
tgttggtcttggaaa

SEQ ID NO: 83181 - DNA, 15 bp, Homo sapiens
gttggtcttggaaat

SEQ ID NO: 83182 - DNA, 15 bp, Homo sapiens
ttggtcttggaaata

SEQ ID NO: 83183 - DNA, 15 bp, Homo sapiens
tggtcttggaaatat

SEQ ID NO: 83184 - DNA, 15 bp, Homo sapiens
ggtcttggaaatata

SEQ ID NO: 83185 - DNA, 15 bp, Homo sapiens
gtcttggaaatataa

SEQ ID NO: 83186 - DNA, 15 bp, Homo sapiens
tcttggaaatataat

SEQ ID NO: 83187 - DNA, 15 bp, Homo sapiens
cttggaaatataata

SEQ ID NO: 83188 - DNA, 15 bp, Homo sapiens
ttggaaatataatac

SEQ ID NO: 83189 - DNA, 15 bp, Homo sapiens
tggaaatataatact

SEQ ID NO: 83190 - DNA, 15 bp, Homo sapiens
ggaaatataatactg

SEQ ID NO: 83191 - DNA, 15 bp, Homo sapiens
gaaatataatactgc

SEQ ID NO: 83192 - DNA, 15 bp, Homo sapiens
aaatataatactgca

SEQ ID NO: 83193 - DNA, 15 bp, Homo sapiens
aatataatactgcag

SEQ ID NO: 83194 - DNA, 15 bp, Homo sapiens
atataatactgcagg

SEQ ID NO: 83195 - DNA, 15 bp, Homo sapiens
tataatactgcaggc

SEQ ID NO: 83196 - DNA, 15 bp, Homo sapiens
ataatactgcaggct

SEQ ID NO: 83197 - DNA, 15 bp, Homo sapiens
taatactgcaggctt

SEQ ID NO: 83198 - DNA, 15 bp, Homo sapiens
aatactgcaggcttc

SEQ ID NO: 83199 - DNA, 15 bp, Homo sapiens
atactgcaggcttct

SEQ ID NO: 83200 - DNA, 15 bp, Homo sapiens
tactgcaggcttctg

SEQ ID NO: 83201 - DNA, 15 bp, Homo sapiens
actgcaggcttctgt

SEQ ID NO: 83202 - DNA, 15 bp, Homo sapiens
ctgcaggcttctgta

SEQ ID NO: 83203 - DNA, 15 bp, Homo sapiens
tgcaggcttctgtaa

SEQ ID NO: 83204 - DNA, 15 bp, Homo sapiens
gcaggcttctgtaaa

SEQ ID NO: 83205 - DNA, 15 bp, Homo sapiens
caggcttctgtaaaa

SEQ ID NO: 83206 - DNA, 15 bp, Homo sapiens
aggcttctgtaaaat

SEQ ID NO: 83207 - DNA, 15 bp, Homo sapiens
ggcttctgtaaaata

SEQ ID NO: 83208 - DNA, 15 bp, Homo sapiens
gcttctgtaaaatac

SEQ ID NO: 83209 - DNA, 15 bp, Homo sapiens
cttctgtaaaatact

SEQ ID NO: 83210 - DNA, 15 bp, Homo sapiens
ttctgtaaaatactt

SEQ ID NO: 83211 - DNA, 15 bp, Homo sapiens
tctgtaaaatacttg

SEQ ID NO: 83212 - DNA, 15 bp, Homo sapiens
ctgtaaaatacttga

SEQ ID NO: 83213 - DNA, 15 bp, Homo sapiens
tgtaaaatacttgaa

SEQ ID NO: 83214 - DNA, 15 bp, Homo sapiens
gtaaaatacttgaaa

SEQ ID NO: 83215 - DNA, 15 bp, Homo sapiens
taaaatacttgaaat

SEQ ID NO: 83216 - DNA, 15 bp, Homo sapiens
aaaatacttgaaatg

SEQ ID NO: 83217 - DNA, 15 bp, Homo sapiens
aaatacttgaaatgt

SEQ ID NO: 83218 - DNA, 15 bp, Homo sapiens
aatacttgaaatgta

SEQ ID NO: 83219 - DNA, 15 bp, Homo sapiens
atacttgaaatgtaa

SEQ ID NO: 83220 - DNA, 15 bp, Homo sapiens
tacttgaaatgtaat

SEQ ID NO: 83221 - DNA, 15 bp, Homo sapiens
acttgaaatgtaatt

SEQ ID NO: 83222 - DNA, 15 bp, Homo sapiens
cttgaaatgtaattg

SEQ ID NO: 83223 - DNA, 15 bp, Homo sapiens
ttgaaatgtaattgt

SEQ ID NO: 83224 - DNA, 15 bp, Homo sapiens
tgaaatgtaattgtt

SEQ ID NO: 83225 - DNA, 15 bp, Homo sapiens
gaaatgtaattgttt

SEQ ID NO: 83226 - DNA, 15 bp, Homo sapiens
aaatgtaattgtttt

SEQ ID NO: 83227 - DNA, 15 bp, Homo sapiens
aatgtaattgtttta

SEQ ID NO: 83228 - DNA, 15 bp, Homo sapiens
atgtaattgttttaa

SEQ ID NO: 83229 - DNA, 15 bp, Homo sapiens
tgtaattgttttaaa

SEQ ID NO: 83230 - DNA, 15 bp, Homo sapiens
gtaattgttttaaaa

SEQ ID NO: 83231 - DNA, 15 bp, Homo sapiens
taattgttttaaaac

SEQ ID NO: 83232 - DNA, 15 bp, Homo sapiens
aattgttttaaaact

SEQ ID NO: 83233 - DNA, 15 bp, Homo sapiens
attgttttaaaactt

SEQ ID NO: 83234 - DNA, 15 bp, Homo sapiens
ttgttttaaaacttt

SEQ ID NO: 83235 - DNA, 15 bp, Homo sapiens
tgttttaaaactttc

SEQ ID NO: 83236 - DNA, 15 bp, Homo sapiens
gttttaaaactttca

SEQ ID NO: 83237 - DNA, 15 bp, Homo sapiens
ttttaaaactttcaa

SEQ ID NO: 83238 - DNA, 15 bp, Homo sapiens
tttaaaactttcaaa

SEQ ID NO: 83239 - DNA, 15 bp, Homo sapiens
ttaaaactttcaaag

SEQ ID NO: 83240 - DNA, 15 bp, Homo sapiens
taaaactttcaaaga

SEQ ID NO: 83241 - DNA, 15 bp, Homo sapiens
aaaactttcaaagat

SEQ ID NO: 83242 - DNA, 15 bp, Homo sapiens
aaactttcaaagata

SEQ ID NO: 83243 - DNA, 15 bp, Homo sapiens
aactttcaaagatac

SEQ ID NO: 83244 - DNA, 15 bp, Homo sapiens
actttcaaagatacc

SEQ ID NO: 83245 - DNA, 15 bp, Homo sapiens
ctttcaaagatacca

SEQ ID NO: 83246 - DNA, 15 bp, Homo sapiens
tttcaaagataccac

SEQ ID NO: 83247 - DNA, 15 bp, Homo sapiens
ttcaaagataccact

SEQ ID NO: 83248 - DNA, 15 bp, Homo sapiens
tcaaagataccactt

SEQ ID NO: 83249 - DNA, 15 bp, Homo sapiens
caaagataccacttg

SEQ ID NO: 83250 - DNA, 15 bp, Homo sapiens
aaagataccacttgt

SEQ ID NO: 83251 - DNA, 15 bp, Homo sapiens
aagataccacttgtt

SEQ ID NO: 83252 - DNA, 15 bp, Homo sapiens
agataccacttgttt

SEQ ID NO: 83253 - DNA, 15 bp, Homo sapiens
gataccacttgtttg

SEQ ID NO: 83254 - DNA, 15 bp, Homo sapiens
ataccacttgtttgc

SEQ ID NO: 83255 - DNA, 15 bp, Homo sapiens
taccacttgtttgcc

SEQ ID NO: 83256 - DNA, 15 bp, Homo sapiens
accacttgtttgcct

SEQ ID NO: 83257 - DNA, 15 bp, Homo sapiens
ccacttgtttgcctg

SEQ ID NO: 83258 - DNA, 15 bp, Homo sapiens
cacttgtttgcctgt

SEQ ID NO: 83259 - DNA, 15 bp, Homo sapiens
acttgtttgcctgtt

SEQ ID NO: 83260 - DNA, 15 bp, Homo sapiens
cttgtttgcctgttg

SEQ ID NO: 83261 - DNA, 15 bp, Homo sapiens
ttgtttgcctgttgg

SEQ ID NO: 83262 - DNA, 15 bp, Homo sapiens
tgtttgcctgttggt

SEQ ID NO: 83263 - DNA, 15 bp, Homo sapiens
gtttgcctgttggtt

SEQ ID NO: 83264 - DNA, 15 bp, Homo sapiens
tttgcctgttggtta

SEQ ID NO: 83265 - DNA, 15 bp, Homo sapiens
ttgcctgttggttag

SEQ ID NO: 83266 - DNA, 15 bp, Homo sapiens
tgcctgttggttaga

SEQ ID NO: 83267 - DNA, 15 bp, Homo sapiens
gcctgttggttagaa

SEQ ID NO: 83268 - DNA, 15 bp, Homo sapiens
cctgttggttagaat

SEQ ID NO: 83269 - DNA, 15 bp, Homo sapiens
ctgttggttagaata

SEQ ID NO: 83270 - DNA, 15 bp, Homo sapiens
tgttggttagaatac

SEQ ID NO: 83271 - DNA, 15 bp, Homo sapiens
gttggttagaatact

SEQ ID NO: 83272 - DNA, 15 bp, Homo sapiens
ttggttagaatactg

SEQ ID NO: 83273 - DNA, 15 bp, Homo sapiens
tggttagaatactgg

SEQ ID NO: 83274 - DNA, 15 bp, Homo sapiens
ggttagaatactggt

SEQ ID NO: 83275 - DNA, 15 bp, Homo sapiens
gttagaatactggtg

SEQ ID NO: 83276 - DNA, 15 bp, Homo sapiens
ttagaatactggtga

SEQ ID NO: 83277 - DNA, 15 bp, Homo sapiens
tagaatactggtgaa

SEQ ID NO: 83278 - DNA, 15 bp, Homo sapiens
agaatactggtgaaa

SEQ ID NO: 83279 - DNA, 15 bp, Homo sapiens
gaatactggtgaaat

SEQ ID NO: 83280 - DNA, 15 bp, Homo sapiens
aatactggtgaaata

SEQ ID NO: 83281 - DNA, 15 bp, Homo sapiens
atactggtgaaataa

SEQ ID NO: 83282 - DNA, 15 bp, Homo sapiens
tactggtgaaataat

SEQ ID NO: 83283 - DNA, 15 bp, Homo sapiens
actggtgaaataatt

SEQ ID NO: 83284 - DNA, 15 bp, Homo sapiens
ctggtgaaataattt

SEQ ID NO: 83285 - DNA, 15 bp, Homo sapiens
tggtgaaataatttt

SEQ ID NO: 83286 - DNA, 15 bp, Homo sapiens
ggtgaaataattttt

SEQ ID NO: 83287 - DNA, 15 bp, Homo sapiens
gtgaaataattttta

SEQ ID NO: 83288 - DNA, 15 bp, Homo sapiens
tgaaataatttttaa

SEQ ID NO: 83289 - DNA, 15 bp, Homo sapiens
gaaataatttttaat

SEQ ID NO: 83290 - DNA, 15 bp, Homo sapiens
aaataatttttaatc

SEQ ID NO: 83291 - DNA, 15 bp, Homo sapiens
aataatttttaatct

SEQ ID NO: 83292 - DNA, 15 bp, Homo sapiens
ataatttttaatctt

SEQ ID NO: 83293 - DNA, 15 bp, Homo sapiens
taatttttaatcttt

SEQ ID NO: 83294 - DNA, 15 bp, Homo sapiens
aatttttaatctttt

SEQ ID NO: 83295 - DNA, 15 bp, Homo sapiens
atttttaatctttta

SEQ ID NO: 83296 - DNA, 15 bp, Homo sapiens
tttttaatcttttat

SEQ ID NO: 83297 - DNA, 15 bp, Homo sapiens
ttttaatcttttatg

SEQ ID NO: 83298 - DNA, 15 bp, Homo sapiens
tttaatcttttatga

SEQ ID NO: 83299 - DNA, 15 bp, Homo sapiens
ttaatcttttatgaa

SEQ ID NO: 83300 - DNA, 15 bp, Homo sapiens
taatcttttatgaat

SEQ ID NO: 83301 - DNA, 15 bp, Homo sapiens
aatcttttatgaata

SEQ ID NO: 83302 - DNA, 15 bp, Homo sapiens
atcttttatgaataa

SEQ ID NO: 83303 - DNA, 15 bp, Homo sapiens
tcttttatgaataac

SEQ ID NO: 83304 - DNA, 15 bp, Homo sapiens
cttttatgaataact

SEQ ID NO: 83305 - DNA, 15 bp, Homo sapiens
ttttatgaataacta

SEQ ID NO: 83306 - DNA, 15 bp, Homo sapiens
tttatgaataactaa

SEQ ID NO: 83307 - DNA, 15 bp, Homo sapiens
ttatgaataactaat

SEQ ID NO: 83308 - DNA, 15 bp, Homo sapiens
tatgaataactaatt

SEQ ID NO: 83309 - DNA, 15 bp, Homo sapiens
atgaataactaattt

SEQ ID NO: 83310 - DNA, 15 bp, Homo sapiens
tgaataactaatttc

SEQ ID NO: 83311 - DNA, 15 bp, Homo sapiens
gaataactaatttca

SEQ ID NO: 83312 - DNA, 15 bp, Homo sapiens
aataactaatttcat

SEQ ID NO: 83313 - DNA, 15 bp, Homo sapiens
ataactaatttcatc

SEQ ID NO: 83314 - DNA, 15 bp, Homo sapiens
taactaatttcatca

SEQ ID NO: 83315 - DNA, 15 bp, Homo sapiens
aactaatttcatcat

SEQ ID NO: 83316 - DNA, 15 bp, Homo sapiens
actaatttcatcata

SEQ ID NO: 83317 - DNA, 15 bp, Homo sapiens
ctaatttcatcataa

SEQ ID NO: 83318 - DNA, 15 bp, Homo sapiens
taatttcatcataag

SEQ ID NO: 83319 - DNA, 15 bp, Homo sapiens
aatttcatcataaga

SEQ ID NO: 83320 - DNA, 15 bp, Homo sapiens
atttcatcataagaa

SEQ ID NO: 83321 - DNA, 15 bp, Homo sapiens
tttcatcataagaaa

SEQ ID NO: 83322 - DNA, 15 bp, Homo sapiens
ttcatcataagaaaa

SEQ ID NO: 83323 - DNA, 15 bp, Homo sapiens
tcatcataagaaaac

SEQ ID NO: 83324 - DNA, 15 bp, Homo sapiens
catcataagaaaact

SEQ ID NO: 83325 - DNA, 15 bp, Homo sapiens
atcataagaaaactt

SEQ ID NO: 83326 - DNA, 15 bp, Homo sapiens
tcataagaaaactta

SEQ ID NO: 83327 - DNA, 15 bp, Homo sapiens
cataagaaaacttag

SEQ ID NO: 83328 - DNA, 15 bp, Homo sapiens
ataagaaaacttagc

SEQ ID NO: 83329 - DNA, 15 bp, Homo sapiens
taagaaaacttagct

SEQ ID NO: 83330 - DNA, 15 bp, Homo sapiens
aagaaaacttagcta

SEQ ID NO: 83331 - DNA, 15 bp, Homo sapiens
agaaaacttagctaa

SEQ ID NO: 83332 - DNA, 15 bp, Homo sapiens
gaaaacttagctaag

SEQ ID NO: 83333 - DNA, 15 bp, Homo sapiens
aaaacttagctaagc

SEQ ID NO: 83334 - DNA, 15 bp, Homo sapiens
aaacttagctaagca

SEQ ID NO: 83335 - DNA, 15 bp, Homo sapiens
aacttagctaagcat

SEQ ID NO: 83336 - DNA, 15 bp, Homo sapiens
acttagctaagcatg

SEQ ID NO: 83337 - DNA, 15 bp, Homo sapiens
cttagctaagcatgg

SEQ ID NO: 83338 - DNA, 15 bp, Homo sapiens
ttagctaagcatggt

SEQ ID NO: 83339 - DNA, 15 bp, Homo sapiens
tagctaagcatggta

SEQ ID NO: 83340 - DNA, 15 bp, Homo sapiens
agctaagcatggtaa

SEQ ID NO: 83341 - DNA, 15 bp, Homo sapiens
gctaagcatggtaaa

SEQ ID NO: 83342 - DNA, 15 bp, Homo sapiens
ctaagcatggtaaag

SEQ ID NO: 83343 - DNA, 15 bp, Homo sapiens
taagcatggtaaagc

SEQ ID NO: 83344 - DNA, 15 bp, Homo sapiens
aagcatggtaaagct

SEQ ID NO: 83345 - DNA, 15 bp, Homo sapiens
agcatggtaaagctg

SEQ ID NO: 83346 - DNA, 15 bp, Homo sapiens
gcatggtaaagctgt

SEQ ID NO: 83347 - DNA, 15 bp, Homo sapiens
catggtaaagctgtt

SEQ ID NO: 83348 - DNA, 15 bp, Homo sapiens
atggtaaagctgttg

SEQ ID NO: 83349 - DNA, 15 bp, Homo sapiens
tggtaaagctgttgt

SEQ ID NO: 83350 - DNA, 15 bp, Homo sapiens
ggtaaagctgttgtt

SEQ ID NO: 83351 - DNA, 15 bp, Homo sapiens
gtaaagctgttgtta

SEQ ID NO: 83352 - DNA, 15 bp, Homo sapiens
taaagctgttgttat

SEQ ID NO: 83353 - DNA, 15 bp, Homo sapiens
aaagctgttgttata

SEQ ID NO: 83354 - DNA, 15 bp, Homo sapiens
aagctgttgttatac

SEQ ID NO: 83355 - DNA, 15 bp, Homo sapiens
agctgttgttataca

SEQ ID NO: 83356 - DNA, 15 bp, Homo sapiens
gctgttgttatacaa

SEQ ID NO: 83357 - DNA, 15 bp, Homo sapiens
ctgttgttatacaac

SEQ ID NO: 83358 - DNA, 15 bp, Homo sapiens
tgttgttatacaact

SEQ ID NO: 83359 - DNA, 15 bp, Homo sapiens
gttgttatacaactg

SEQ ID NO: 83360 - DNA, 15 bp, Homo sapiens
ttgttatacaactgt

SEQ ID NO: 83361 - DNA, 15 bp, Homo sapiens
tgttatacaactgtg

SEQ ID NO: 83362 - DNA, 15 bp, Homo sapiens
gttatacaactgtgg

SEQ ID NO: 83363 - DNA, 15 bp, Homo sapiens
ttatacaactgtgga

SEQ ID NO: 83364 - DNA, 15 bp, Homo sapiens
tatacaactgtggaa

SEQ ID NO: 83365 - DNA, 15 bp, Homo sapiens
atacaactgtggaat

SEQ ID NO: 83366 - DNA, 15 bp, Homo sapiens
tacaactgtggaatt

SEQ ID NO: 83367 - DNA, 15 bp, Homo sapiens
acaactgtggaattc

SEQ ID NO: 83368 - DNA, 15 bp, Homo sapiens
caactgtggaattct

SEQ ID NO: 83369 - DNA, 15 bp, Homo sapiens
aactgtggaattctt

SEQ ID NO: 83370 - DNA, 15 bp, Homo sapiens
actgtggaattcttc

SEQ ID NO: 83371 - DNA, 15 bp, Homo sapiens
ctgtggaattcttcc

SEQ ID NO: 83372 - DNA, 15 bp, Homo sapiens
tgtggaattcttcct

SEQ ID NO: 83373 - DNA, 15 bp, Homo sapiens
gtggaattcttcctg

SEQ ID NO: 83374 - DNA, 15 bp, Homo sapiens
tggaattcttcctga

SEQ ID NO: 83375 - DNA, 15 bp, Homo sapiens
ggaattcttcctgag

SEQ ID NO: 83376 - DNA, 15 bp, Homo sapiens
gaattcttcctgagg

SEQ ID NO: 83377 - DNA, 15 bp, Homo sapiens
aattcttcctgagga

SEQ ID NO: 83378 - DNA, 15 bp, Homo sapiens
attcttcctgaggag

SEQ ID NO: 83379 - DNA, 15 bp, Homo sapiens
ttcttcctgaggagt

SEQ ID NO: 83380 - DNA, 15 bp, Homo sapiens
tcttcctgaggagta

SEQ ID NO: 83381 - DNA, 15 bp, Homo sapiens
cttcctgaggagtaa

SEQ ID NO: 83382 - DNA, 15 bp, Homo sapiens
ttcctgaggagtaac

SEQ ID NO: 83383 - DNA, 15 bp, Homo sapiens
tcctgaggagtaact

SEQ ID NO: 83384 - DNA, 15 bp, Homo sapiens
cctgaggagtaacta

SEQ ID NO: 83385 - DNA, 15 bp, Homo sapiens
ctgaggagtaactat

SEQ ID NO: 83386 - DNA, 15 bp, Homo sapiens
tgaggagtaactatc

SEQ ID NO: 83387 - DNA, 15 bp, Homo sapiens
gaggagtaactatct

SEQ ID NO: 83388 - DNA, 15 bp, Homo sapiens
aggagtaactatctt

SEQ ID NO: 83389 - DNA, 15 bp, Homo sapiens
ggagtaactatctta

SEQ ID NO: 83390 - DNA, 15 bp, Homo sapiens
gagtaactatcttat

SEQ ID NO: 83391 - DNA, 15 bp, Homo sapiens
agtaactatcttata

SEQ ID NO: 83392 - DNA, 15 bp, Homo sapiens
gtaactatcttataa

SEQ ID NO: 83393 - DNA, 15 bp, Homo sapiens
taactatcttataat

SEQ ID NO: 83394 - DNA, 15 bp, Homo sapiens
aactatcttataata

SEQ ID NO: 83395 - DNA, 15 bp, Homo sapiens
actatcttataataa

SEQ ID NO: 83396 - DNA, 15 bp, Homo sapiens
ctatcttataataaa

SEQ ID NO: 83397 - DNA, 15 bp, Homo sapiens
tatcttataataaat

SEQ ID NO: 83398 - DNA, 15 bp, Homo sapiens
atcttataataaatg

SEQ ID NO: 83399 - DNA, 15 bp, Homo sapiens
tcttataataaatgt

SEQ ID NO: 83400 - DNA, 15 bp, Homo sapiens
cttataataaatgta

SEQ ID NO: 83401 - DNA, 15 bp, Homo sapiens
ttataataaatgtag

SEQ ID NO: 83402 - DNA, 15 bp, Homo sapiens
tataataaatgtagt

SEQ ID NO: 83403 - DNA, 15 bp, Homo sapiens
ataataaatgtagtt

SEQ ID NO: 83404 - DNA, 15 bp, Homo sapiens
taataaatgtagttg

SEQ ID NO: 83405 - DNA, 15 bp, Homo sapiens
aataaatgtagttga

SEQ ID NO: 83406 - DNA, 15 bp, Homo sapiens
ataaatgtagttgat

SEQ ID NO: 83407 - DNA, 15 bp, Homo sapiens
taaatgtagttgatt

SEQ ID NO: 83408 - DNA, 15 bp, Homo sapiens
aaatgtagttgatta

SEQ ID NO: 83409 - DNA, 15 bp, Homo sapiens
aatgtagttgattat

SEQ ID NO: 83410 - DNA, 15 bp, Homo sapiens
atgtagttgattatc

SEQ ID NO: 83411 - DNA, 15 bp, Homo sapiens
tgtagttgattatct

SEQ ID NO: 83412 - DNA, 15 bp, Homo sapiens
gtagttgattatcta

SEQ ID NO: 83413 - DNA, 15 bp, Homo sapiens
tagttgattatctaa

SEQ ID NO: 83414 - DNA, 15 bp, Homo sapiens
agttgattatctaaa

SEQ ID NO: 83415 - DNA, 15 bp, Homo sapiens
gttgattatctaaag

SEQ ID NO: 83416 - DNA, 15 bp, Homo sapiens
ttgattatctaaagt

SEQ ID NO: 83417 - DNA, 15 bp, Homo sapiens
tgattatctaaagta

SEQ ID NO: 83418 - DNA, 15 bp, Homo sapiens
gattatctaaagtag

SEQ ID NO: 83419 - DNA, 15 bp, Homo sapiens
attatctaaagtagt

SEQ ID NO: 83420 - DNA, 15 bp, Homo sapiens
ttatctaaagtagtt

SEQ ID NO: 83421 - DNA, 15 bp, Homo sapiens
tatctaaagtagttt

SEQ ID NO: 83422 - DNA, 15 bp, Homo sapiens
atctaaagtagtttt

SEQ ID NO: 83423 - DNA, 15 bp, Homo sapiens
tctaaagtagtttta

SEQ ID NO: 83424 - DNA, 15 bp, Homo sapiens
ctaaagtagttttat

SEQ ID NO: 83425 - DNA, 15 bp, Homo sapiens
taaagtagttttatt

SEQ ID NO: 83426 - DNA, 15 bp, Homo sapiens
aaagtagttttattc

SEQ ID NO: 83427 - DNA, 15 bp, Homo sapiens
aagtagttttattct

SEQ ID NO: 83428 - DNA, 15 bp, Homo sapiens
agtagttttattctt

SEQ ID NO: 83429 - DNA, 15 bp, Homo sapiens
gtagttttattcttg

SEQ ID NO: 83430 - DNA, 15 bp, Homo sapiens
tagttttattcttgg

SEQ ID NO: 83431 - DNA, 15 bp, Homo sapiens
agttttattcttgga

SEQ ID NO: 83432 - DNA, 15 bp, Homo sapiens
gttttattcttggaa

SEQ ID NO: 83433 - DNA, 15 bp, Homo sapiens
ttttattcttggaat

SEQ ID NO: 83434 - DNA, 15 bp, Homo sapiens
tttattcttggaata

SEQ ID NO: 83435 - DNA, 15 bp, Homo sapiens
ttattcttggaatat

SEQ ID NO: 83436 - DNA, 15 bp, Homo sapiens
tattcttggaatatc

SEQ ID NO: 83437 - DNA, 15 bp, Homo sapiens
attcttggaatatct

SEQ ID NO: 83438 - DNA, 15 bp, Homo sapiens
ttcttggaatatctc

SEQ ID NO: 83439 - DNA, 15 bp, Homo sapiens
tcttggaatatctca

SEQ ID NO: 83440 - DNA, 15 bp, Homo sapiens
cttggaatatctcat

SEQ ID NO: 83441 - DNA, 15 bp, Homo sapiens
ttggaatatctcata

SEQ ID NO: 83442 - DNA, 15 bp, Homo sapiens
tggaatatctcataa

SEQ ID NO: 83443 - DNA, 15 bp, Homo sapiens
ggaatatctcataat

SEQ ID NO: 83444 - DNA, 15 bp, Homo sapiens
gaatatctcataata

SEQ ID NO: 83445 - DNA, 15 bp, Homo sapiens
aatatctcataatag

SEQ ID NO: 83446 - DNA, 15 bp, Homo sapiens
atatctcataatagg

SEQ ID NO: 83447 - DNA, 15 bp, Homo sapiens
tatctcataataggt

SEQ ID NO: 83448 - DNA, 15 bp, Homo sapiens
atctcataataggtt

SEQ ID NO: 83449 - DNA, 15 bp, Homo sapiens
tctcataataggttt

SEQ ID NO: 83450 - DNA, 15 bp, Homo sapiens
ctcataataggttta

SEQ ID NO: 83451 - DNA, 15 bp, Homo sapiens
tcataataggtttat

SEQ ID NO: 83452 - DNA, 15 bp, Homo sapiens
cataataggtttatt

SEQ ID NO: 83453 - DNA, 15 bp, Homo sapiens
ataataggtttattc

SEQ ID NO: 83454 - DNA, 15 bp, Homo sapiens
taataggtttattct

SEQ ID NO: 83455 - DNA, 15 bp, Homo sapiens
aataggtttattctc

SEQ ID NO: 83456 - DNA, 15 bp, Homo sapiens
ataggtttattctct

SEQ ID NO: 83457 - DNA, 15 bp, Homo sapiens
taggtttattctctt

SEQ ID NO: 83458 - DNA, 15 bp, Homo sapiens
aggtttattctcttc

SEQ ID NO: 83459 - DNA, 15 bp, Homo sapiens
ggtttattctcttct

SEQ ID NO: 83460 - DNA, 15 bp, Homo sapiens
gtttattctcttctt

SEQ ID NO: 83461 - DNA, 15 bp, Homo sapiens
tttattctcttcttg

SEQ ID NO: 83462 - DNA, 15 bp, Homo sapiens
ttattctcttcttgt

SEQ ID NO: 83463 - DNA, 15 bp, Homo sapiens
tattctcttcttgtc

SEQ ID NO: 83464 - DNA, 15 bp, Homo sapiens
attctcttcttgtca

SEQ ID NO: 83465 - DNA, 15 bp, Homo sapiens
ttctcttcttgtcag

SEQ ID NO: 83466 - DNA, 15 bp, Homo sapiens
tctcttcttgtcagt

SEQ ID NO: 83467 - DNA, 15 bp, Homo sapiens
ctcttcttgtcagta

SEQ ID NO: 83468 - DNA, 15 bp, Homo sapiens
tcttcttgtcagtat

SEQ ID NO: 83469 - DNA, 15 bp, Homo sapiens
cttcttgtcagtatt

SEQ ID NO: 83470 - DNA, 15 bp, Homo sapiens
ttcttgtcagtattt

SEQ ID NO: 83471 - DNA, 15 bp, Homo sapiens
tcttgtcagtatttc

SEQ ID NO: 83472 - DNA, 15 bp, Homo sapiens
cttgtcagtatttcc

SEQ ID NO: 83473 - DNA, 15 bp, Homo sapiens
ttgtcagtatttcct

SEQ ID NO: 83474 - DNA, 15 bp, Homo sapiens
tgtcagtatttcctt

SEQ ID NO: 83475 - DNA, 15 bp, Homo sapiens
gtcagtatttccttg

SEQ ID NO: 83476 - DNA, 15 bp, Homo sapiens
tcagtatttccttgt

SEQ ID NO: 83477 - DNA, 15 bp, Homo sapiens
cagtatttccttgta

SEQ ID NO: 83478 - DNA, 15 bp, Homo sapiens
agtatttccttgtag

SEQ ID NO: 83479 - DNA, 15 bp, Homo sapiens
gtatttccttgtaga

SEQ ID NO: 83480 - DNA, 15 bp, Homo sapiens
tatttccttgtagat

SEQ ID NO: 83481 - DNA, 15 bp, Homo sapiens
atttccttgtagatt

SEQ ID NO: 83482 - DNA, 15 bp, Homo sapiens
tttccttgtagattg

SEQ ID NO: 83483 - DNA, 15 bp, Homo sapiens
ttccttgtagattga

SEQ ID NO: 83484 - DNA, 15 bp, Homo sapiens
tccttgtagattgag

SEQ ID NO: 83485 - DNA, 15 bp, Homo sapiens
ccttgtagattgagc

SEQ ID NO: 83486 - DNA, 15 bp, Homo sapiens
cttgtagattgagcc

SEQ ID NO: 83487 - DNA, 15 bp, Homo sapiens
ttgtagattgagcct

SEQ ID NO: 83488 - DNA, 15 bp, Homo sapiens
tgtagattgagcctg

SEQ ID NO: 83489 - DNA, 15 bp, Homo sapiens
gtagattgagcctgt

SEQ ID NO: 83490 - DNA, 15 bp, Homo sapiens
tagattgagcctgtg

SEQ ID NO: 83491 - DNA, 15 bp, Homo sapiens
agattgagcctgtgg

SEQ ID NO: 83492 - DNA, 15 bp, Homo sapiens
gattgagcctgtgga

SEQ ID NO: 83493 - DNA, 15 bp, Homo sapiens
attgagcctgtggat

SEQ ID NO: 83494 - DNA, 15 bp, Homo sapiens
ttgagcctgtggatt

SEQ ID NO: 83495 - DNA, 15 bp, Homo sapiens
tgagcctgtggattt

SEQ ID NO: 83496 - DNA, 15 bp, Homo sapiens
gagcctgtggatttg

SEQ ID NO: 83497 - DNA, 15 bp, Homo sapiens
agcctgtggatttgc

SEQ ID NO: 83498 - DNA, 15 bp, Homo sapiens
gcctgtggatttgca

SEQ ID NO: 83499 - DNA, 15 bp, Homo sapiens
cctgtggatttgcat

SEQ ID NO: 83500 - DNA, 15 bp, Homo sapiens
ctgtggatttgcatt

SEQ ID NO: 83501 - DNA, 15 bp, Homo sapiens
tgtggatttgcattt

SEQ ID NO: 83502 - DNA, 15 bp, Homo sapiens
gtggatttgcatttt

SEQ ID NO: 83503 - DNA, 15 bp, Homo sapiens
tggatttgcattttt

SEQ ID NO: 83504 - DNA, 15 bp, Homo sapiens
ggatttgcatttttg

SEQ ID NO: 83505 - DNA, 15 bp, Homo sapiens
gatttgcatttttgt

SEQ ID NO: 83506 - DNA, 15 bp, Homo sapiens
atttgcatttttgta

SEQ ID NO: 83507 - DNA, 15 bp, Homo sapiens
tttgcatttttgtaa

SEQ ID NO: 83508 - DNA, 15 bp, Homo sapiens
ttgcatttttgtaat

SEQ ID NO: 83509 - DNA, 15 bp, Homo sapiens
tgcatttttgtaatt

SEQ ID NO: 83510 - DNA, 15 bp, Homo sapiens
gcatttttgtaattg

SEQ ID NO: 83511 - DNA, 15 bp, Homo sapiens
catttttgtaattgt

SEQ ID NO: 83512 - DNA, 15 bp, Homo sapiens
atttttgtaattgtg

SEQ ID NO: 83513 - DNA, 15 bp, Homo sapiens
tttttgtaattgtga

SEQ ID NO: 83514 - DNA, 15 bp, Homo sapiens
ttttgtaattgtgaa

SEQ ID NO: 83515 - DNA, 15 bp, Homo sapiens
tttgtaattgtgaat

SEQ ID NO: 83516 - DNA, 15 bp, Homo sapiens
ttgtaattgtgaatc

SEQ ID NO: 83517 - DNA, 15 bp, Homo sapiens
tgtaattgtgaatca

SEQ ID NO: 83518 - DNA, 15 bp, Homo sapiens
gtaattgtgaatcac

SEQ ID NO: 83519 - DNA, 15 bp, Homo sapiens
taattgtgaatcacc

SEQ ID NO: 83520 - DNA, 15 bp, Homo sapiens
aattgtgaatcacca

SEQ ID NO: 83521 - DNA, 15 bp, Homo sapiens
attgtgaatcaccat

SEQ ID NO: 83522 - DNA, 15 bp, Homo sapiens
ttgtgaatcaccatt

SEQ ID NO: 83523 - DNA, 15 bp, Homo sapiens
tgtgaatcaccatta

SEQ ID NO: 83524 - DNA, 15 bp, Homo sapiens
gtgaatcaccattat

SEQ ID NO: 83525 - DNA, 15 bp, Homo sapiens
tgaatcaccattata

SEQ ID NO: 83526 - DNA, 15 bp, Homo sapiens
gaatcaccattatag

SEQ ID NO: 83527 - DNA, 15 bp, Homo sapiens
aatcaccattatagg

SEQ ID NO: 83528 - DNA, 15 bp, Homo sapiens
atcaccattatagga

SEQ ID NO: 83529 - DNA, 15 bp, Homo sapiens
tcaccattataggag

SEQ ID NO: 83530 - DNA, 15 bp, Homo sapiens
caccattataggaga

SEQ ID NO: 83531 - DNA, 15 bp, Homo sapiens
accattataggagat

SEQ ID NO: 83532 - DNA, 15 bp, Homo sapiens
ccattataggagata

SEQ ID NO: 83533 - DNA, 15 bp, Homo sapiens
cattataggagatac

SEQ ID NO: 83534 - DNA, 15 bp, Homo sapiens
attataggagataca

SEQ ID NO: 83535 - DNA, 15 bp, Homo sapiens
ttataggagatacat

SEQ ID NO: 83536 - DNA, 15 bp, Homo sapiens
tataggagatacatg

SEQ ID NO: 83537 - DNA, 15 bp, Homo sapiens
ataggagatacatgc

SEQ ID NO: 83538 - DNA, 15 bp, Homo sapiens
taggagatacatgca

SEQ ID NO: 83539 - DNA, 15 bp, Homo sapiens
aggagatacatgcat

SEQ ID NO: 83540 - DNA, 15 bp, Homo sapiens
ggagatacatgcatt

SEQ ID NO: 83541 - DNA, 15 bp, Homo sapiens
gagatacatgcattt

SEQ ID NO: 83542 - DNA, 15 bp, Homo sapiens
agatacatgcatttt

SEQ ID NO: 83543 - DNA, 15 bp, Homo sapiens
gatacatgcatttta

SEQ ID NO: 83544 - DNA, 15 bp, Homo sapiens
atacatgcattttat

SEQ ID NO: 83545 - DNA, 15 bp, Homo sapiens
tacatgcattttatc

SEQ ID NO: 83546 - DNA, 15 bp, Homo sapiens
acatgcattttatct

SEQ ID NO: 83547 - DNA, 15 bp, Homo sapiens
catgcattttatcta

SEQ ID NO: 83548 - DNA, 15 bp, Homo sapiens
atgcattttatctac

SEQ ID NO: 83549 - DNA, 15 bp, Homo sapiens
tgcattttatctact

SEQ ID NO: 83550 - DNA, 15 bp, Homo sapiens
gcattttatctactt

SEQ ID NO: 83551 - DNA, 15 bp, Homo sapiens
cattttatctacttt

SEQ ID NO: 83552 - DNA, 15 bp, Homo sapiens
attttatctactttt

SEQ ID NO: 83553 - DNA, 15 bp, Homo sapiens
ttttatctacttttc

SEQ ID NO: 83554 - DNA, 15 bp, Homo sapiens
tttatctacttttca

SEQ ID NO: 83555 - DNA, 15 bp, Homo sapiens
ttatctacttttcag

SEQ ID NO: 83556 - DNA, 15 bp, Homo sapiens
tatctacttttcagt

SEQ ID NO: 83557 - DNA, 15 bp, Homo sapiens
atctacttttcagtt

SEQ ID NO: 83558 - DNA, 15 bp, Homo sapiens
tctacttttcagttt

SEQ ID NO: 83559 - DNA, 15 bp, Homo sapiens
ctacttttcagtttg

SEQ ID NO: 83560 - DNA, 15 bp, Homo sapiens
tacttttcagtttgt

SEQ ID NO: 83561 - DNA, 15 bp, Homo sapiens
acttttcagtttgta

SEQ ID NO: 83562 - DNA, 15 bp, Homo sapiens
cttttcagtttgtat

SEQ ID NO: 83563 - DNA, 15 bp, Homo sapiens
ttttcagtttgtatg

SEQ ID NO: 83564 - DNA, 15 bp, Homo sapiens
tttcagtttgtatgg

SEQ ID NO: 83565 - DNA, 15 bp, Homo sapiens
ttcagtttgtatggg

SEQ ID NO: 83566 - DNA, 15 bp, Homo sapiens
tcagtttgtatgggg

SEQ ID NO: 83567 - DNA, 15 bp, Homo sapiens
cagtttgtatggggt

SEQ ID NO: 83568 - DNA, 15 bp, Homo sapiens
agtttgtatggggtt

SEQ ID NO: 83569 - DNA, 15 bp, Homo sapiens
gtttgtatggggtta

SEQ ID NO: 83570 - DNA, 15 bp, Homo sapiens
tttgtatggggttaa

SEQ ID NO: 83571 - DNA, 15 bp, Homo sapiens
ttgtatggggttaac

SEQ ID NO: 83572 - DNA, 15 bp, Homo sapiens
tgtatggggttaact

SEQ ID NO: 83573 - DNA, 15 bp, Homo sapiens
gtatggggttaactt

SEQ ID NO: 83574 - DNA, 15 bp, Homo sapiens
tatggggttaacttt

SEQ ID NO: 83575 - DNA, 15 bp, Homo sapiens
atggggttaacttta

SEQ ID NO: 83576 - DNA, 15 bp, Homo sapiens
tggggttaactttat

SEQ ID NO: 83577 - DNA, 15 bp, Homo sapiens
ggggttaactttatt

SEQ ID NO: 83578 - DNA, 15 bp, Homo sapiens
gggttaactttatta

SEQ ID NO: 83579 - DNA, 15 bp, Homo sapiens
ggttaactttattag

SEQ ID NO: 83580 - DNA, 15 bp, Homo sapiens
gttaactttattaga

SEQ ID NO: 83581 - DNA, 15 bp, Homo sapiens
ttaactttattagaa

SEQ ID NO: 83582 - DNA, 15 bp, Homo sapiens
taactttattagaat

SEQ ID NO: 83583 - DNA, 15 bp, Homo sapiens
aactttattagaatt

SEQ ID NO: 83584 - DNA, 15 bp, Homo sapiens
actttattagaatta

SEQ ID NO: 83585 - DNA, 15 bp, Homo sapiens
ctttattagaattat

SEQ ID NO: 83586 - DNA, 15 bp, Homo sapiens
tttattagaattatc

SEQ ID NO: 83587 - DNA, 15 bp, Homo sapiens
ttattagaattatct

SEQ ID NO: 83588 - DNA, 15 bp, Homo sapiens
tattagaattatctt

SEQ ID NO: 83589 - DNA, 15 bp, Homo sapiens
attagaattatcttt

SEQ ID NO: 83590 - DNA, 15 bp, Homo sapiens
ttagaattatcttta

SEQ ID NO: 83591 - DNA, 15 bp, Homo sapiens
tagaattatctttaa

SEQ ID NO: 83592 - DNA, 15 bp, Homo sapiens
agaattatctttaat

SEQ ID NO: 83593 - DNA, 15 bp, Homo sapiens
gaattatctttaatg

SEQ ID NO: 83594 - DNA, 15 bp, Homo sapiens
aattatctttaatgt

SEQ ID NO: 83595 - DNA, 15 bp, Homo sapiens
attatctttaatgtt

SEQ ID NO: 83596 - DNA, 15 bp, Homo sapiens
ttatctttaatgtta

SEQ ID NO: 83597 - DNA, 15 bp, Homo sapiens
tatctttaatgttat

SEQ ID NO: 83598 - DNA, 15 bp, Homo sapiens
atctttaatgttatt

SEQ ID NO: 83599 - DNA, 15 bp, Homo sapiens
tctttaatgttattt

SEQ ID NO: 83600 - DNA, 15 bp, Homo sapiens
ctttaatgttatttt

SEQ ID NO: 83601 - DNA, 15 bp, Homo sapiens
tttaatgttattttg

SEQ ID NO: 83602 - DNA, 15 bp, Homo sapiens
ttaatgttattttgc

SEQ ID NO: 83603 - DNA, 15 bp, Homo sapiens
taatgttattttgct

SEQ ID NO: 83604 - DNA, 15 bp, Homo sapiens
aatgttattttgctt

SEQ ID NO: 83605 - DNA, 15 bp, Homo sapiens
atgttattttgctta

SEQ ID NO: 83606 - DNA, 15 bp, Homo sapiens
tgttattttgcttat

SEQ ID NO: 83607 - DNA, 15 bp, Homo sapiens
gttattttgcttata

SEQ ID NO: 83608 - DNA, 15 bp, Homo sapiens
ttattttgcttatat

SEQ ID NO: 83609 - DNA, 15 bp, Homo sapiens
tattttgcttatatc

SEQ ID NO: 83610 - DNA, 15 bp, Homo sapiens
attttgcttatatcc

SEQ ID NO: 83611 - DNA, 15 bp, Homo sapiens
ttttgcttatatcct

SEQ ID NO: 83612 - DNA, 15 bp, Homo sapiens
tttgcttatatcctt

SEQ ID NO: 83613 - DNA, 15 bp, Homo sapiens
ttgcttatatcctta

SEQ ID NO: 83614 - DNA, 15 bp, Homo sapiens
tgcttatatccttaa

SEQ ID NO: 83615 - DNA, 15 bp, Homo sapiens
gcttatatccttaat

SEQ ID NO: 83616 - DNA, 15 bp, Homo sapiens
cttatatccttaatt

SEQ ID NO: 83617 - DNA, 15 bp, Homo sapiens
ttatatccttaattt

SEQ ID NO: 83618 - DNA, 15 bp, Homo sapiens
tatatccttaatttt

SEQ ID NO: 83619 - DNA, 15 bp, Homo sapiens
atatccttaatttta

SEQ ID NO: 83620 - DNA, 15 bp, Homo sapiens
tatccttaattttaa

SEQ ID NO: 83621 - DNA, 15 bp, Homo sapiens
atccttaattttaat

SEQ ID NO: 83622 - DNA, 15 bp, Homo sapiens
tccttaattttaatt

SEQ ID NO: 83623 - DNA, 15 bp, Homo sapiens
ccttaattttaatta

SEQ ID NO: 83624 - DNA, 15 bp, Homo sapiens
cttaattttaattat

SEQ ID NO: 83625 - DNA, 15 bp, Homo sapiens
ttaattttaattata

SEQ ID NO: 83626 - DNA, 15 bp, Homo sapiens
taattttaattatag

SEQ ID NO: 83627 - DNA, 15 bp, Homo sapiens
aattttaattataga

SEQ ID NO: 83628 - DNA, 15 bp, Homo sapiens
attttaattatagac

SEQ ID NO: 83629 - DNA, 15 bp, Homo sapiens
ttttaattatagaca

SEQ ID NO: 83630 - DNA, 15 bp, Homo sapiens
tttaattatagacaa

SEQ ID NO: 83631 - DNA, 15 bp, Homo sapiens
ttaattatagacaaa

SEQ ID NO: 83632 - DNA, 15 bp, Homo sapiens
taattatagacaaac

SEQ ID NO: 83633 - DNA, 15 bp, Homo sapiens
aattatagacaaaca

SEQ ID NO: 83634 - DNA, 15 bp, Homo sapiens
attatagacaaacat

SEQ ID NO: 83635 - DNA, 15 bp, Homo sapiens
ttatagacaaacatt

SEQ ID NO: 83636 - DNA, 15 bp, Homo sapiens
tatagacaaacatta

SEQ ID NO: 83637 - DNA, 15 bp, Homo sapiens
atagacaaacattaa

SEQ ID NO: 83638 - DNA, 15 bp, Homo sapiens
tagacaaacattaag

SEQ ID NO: 83639 - DNA, 15 bp, Homo sapiens
agacaaacattaaga

SEQ ID NO: 83640 - DNA, 15 bp, Homo sapiens
gacaaacattaagaa

SEQ ID NO: 83641 - DNA, 15 bp, Homo sapiens
acaaacattaagaag

SEQ ID NO: 83642 - DNA, 15 bp, Homo sapiens
caaacattaagaagc

SEQ ID NO: 83643 - DNA, 15 bp, Homo sapiens
aaacattaagaagct

SEQ ID NO: 83644 - DNA, 15 bp, Homo sapiens
aacattaagaagctg

SEQ ID NO: 83645 - DNA, 15 bp, Homo sapiens
acattaagaagctgg

SEQ ID NO: 83646 - DNA, 15 bp, Homo sapiens
cattaagaagctgga

SEQ ID NO: 83647 - DNA, 15 bp, Homo sapiens
attaagaagctggag

SEQ ID NO: 83648 - DNA, 15 bp, Homo sapiens
ttaagaagctggaga

SEQ ID NO: 83649 - DNA, 15 bp, Homo sapiens
taagaagctggagaa

SEQ ID NO: 83650 - DNA, 15 bp, Homo sapiens
aagaagctggagaaa

SEQ ID NO: 83651 - DNA, 15 bp, Homo sapiens
agaagctggagaaaa

SEQ ID NO: 83652 - DNA, 15 bp, Homo sapiens
gaagctggagaaaat

SEQ ID NO: 83653 - DNA, 15 bp, Homo sapiens
aagctggagaaaatt

SEQ ID NO: 83654 - DNA, 15 bp, Homo sapiens
agctggagaaaatta

SEQ ID NO: 83655 - DNA, 15 bp, Homo sapiens
gctggagaaaattat

SEQ ID NO: 83656 - DNA, 15 bp, Homo sapiens
ctggagaaaattatg

SEQ ID NO: 83657 - DNA, 15 bp, Homo sapiens
tggagaaaattatgt

SEQ ID NO: 83658 - DNA, 15 bp, Homo sapiens
ggagaaaattatgtt

SEQ ID NO: 83659 - DNA, 15 bp, Homo sapiens
gagaaaattatgttc

SEQ ID NO: 83660 - DNA, 15 bp, Homo sapiens
agaaaattatgttct

SEQ ID NO: 83661 - DNA, 15 bp, Homo sapiens
gaaaattatgttcta

SEQ ID NO: 83662 - DNA, 15 bp, Homo sapiens
aaaattatgttctag

SEQ ID NO: 83663 - DNA, 15 bp, Homo sapiens
aaattatgttctagt

SEQ ID NO: 83664 - DNA, 15 bp, Homo sapiens
aattatgttctagtg

SEQ ID NO: 83665 - DNA, 15 bp, Homo sapiens
attatgttctagtga

SEQ ID NO: 83666 - DNA, 15 bp, Homo sapiens
ttatgttctagtgac

SEQ ID NO: 83667 - DNA, 15 bp, Homo sapiens
tatgttctagtgaca

SEQ ID NO: 83668 - DNA, 15 bp, Homo sapiens
atgttctagtgacat

SEQ ID NO: 83669 - DNA, 15 bp, Homo sapiens
tgttctagtgacatt

SEQ ID NO: 83670 - DNA, 15 bp, Homo sapiens
gttctagtgacattt

SEQ ID NO: 83671 - DNA, 15 bp, Homo sapiens
ttctagtgacattta

SEQ ID NO: 83672 - DNA, 15 bp, Homo sapiens
tctagtgacatttat

SEQ ID NO: 83673 - DNA, 15 bp, Homo sapiens
ctagtgacatttata

SEQ ID NO: 83674 - DNA, 15 bp, Homo sapiens
tagtgacatttatat

SEQ ID NO: 83675 - DNA, 15 bp, Homo sapiens
agtgacatttatata

SEQ ID NO: 83676 - DNA, 15 bp, Homo sapiens
gtgacatttatatag

SEQ ID NO: 83677 - DNA, 15 bp, Homo sapiens
tgacatttatataga

SEQ ID NO: 83678 - DNA, 15 bp, Homo sapiens
gacatttatatagaa

SEQ ID NO: 83679 - DNA, 15 bp, Homo sapiens
acatttatatagaag

SEQ ID NO: 83680 - DNA, 15 bp, Homo sapiens
catttatatagaaga

SEQ ID NO: 83681 - DNA, 15 bp, Homo sapiens
atttatatagaagaa

SEQ ID NO: 83682 - DNA, 15 bp, Homo sapiens
tttatatagaagaag

SEQ ID NO: 83683 - DNA, 15 bp, Homo sapiens
ttatatagaagaaga

SEQ ID NO: 83684 - DNA, 15 bp, Homo sapiens
tatatagaagaagaa

SEQ ID NO: 83685 - DNA, 15 bp, Homo sapiens
atatagaagaagaat

SEQ ID NO: 83686 - DNA, 15 bp, Homo sapiens
tatagaagaagaatc

SEQ ID NO: 83687 - DNA, 15 bp, Homo sapiens
atagaagaagaatct

SEQ ID NO: 83688 - DNA, 15 bp, Homo sapiens
tagaagaagaatctt

SEQ ID NO: 83689 - DNA, 15 bp, Homo sapiens
agaagaagaatcttt

SEQ ID NO: 83690 - DNA, 15 bp, Homo sapiens
gaagaagaatctttt

SEQ ID NO: 83691 - DNA, 15 bp, Homo sapiens
aagaagaatcttttt

SEQ ID NO: 83692 - DNA, 15 bp, Homo sapiens
agaagaatctttttt

SEQ ID NO: 83693 - DNA, 15 bp, Homo sapiens
gaagaatcttttttc

SEQ ID NO: 83694 - DNA, 15 bp, Homo sapiens
aagaatcttttttcc

SEQ ID NO: 83695 - DNA, 15 bp, Homo sapiens
agaatcttttttccc

SEQ ID NO: 83696 - DNA, 15 bp, Homo sapiens
gaatcttttttcccc

SEQ ID NO: 83697 - DNA, 15 bp, Homo sapiens
aatcttttttccccc

SEQ ID NO: 83698 - DNA, 15 bp, Homo sapiens
atcttttttccccct

SEQ ID NO: 83699 - DNA, 15 bp, Homo sapiens
tcttttttccccctt

SEQ ID NO: 83700 - DNA, 15 bp, Homo sapiens
cttttttcccccttt

SEQ ID NO: 83701 - DNA, 15 bp, Homo sapiens
ttttttccccctttc

SEQ ID NO: 83702 - DNA, 15 bp, Homo sapiens
tttttccccctttct

SEQ ID NO: 83703 - DNA, 15 bp, Homo sapiens
ttttccccctttctt

SEQ ID NO: 83704 - DNA, 15 bp, Homo sapiens
tttccccctttcttt

SEQ ID NO: 83705 - DNA, 15 bp, Homo sapiens
ttccccctttctttt

SEQ ID NO: 83706 - DNA, 15 bp, Homo sapiens
tccccctttcttttt

SEQ ID NO: 83707 - DNA, 15 bp, Homo sapiens
ccccctttctttttt

SEQ ID NO: 83708 - DNA, 15 bp, Homo sapiens
cccctttcttttttg

SEQ ID NO: 83709 - DNA, 15 bp, Homo sapiens
ccctttcttttttga

SEQ ID NO: 83710 - DNA, 15 bp, Homo sapiens
cctttcttttttgaa

SEQ ID NO: 83711 - DNA, 15 bp, Homo sapiens
ctttcttttttgaag

SEQ ID NO: 83712 - DNA, 15 bp, Homo sapiens
tttcttttttgaagg

SEQ ID NO: 83713 - DNA, 15 bp, Homo sapiens
ttcttttttgaaggg

SEQ ID NO: 83714 - DNA, 15 bp, Homo sapiens
tcttttttgaaggga

SEQ ID NO: 83715 - DNA, 15 bp, Homo sapiens
cttttttgaagggag

SEQ ID NO: 83716 - DNA, 15 bp, Homo sapiens
ttttttgaagggaga

SEQ ID NO: 83717 - DNA, 15 bp, Homo sapiens
tttttgaagggagat

SEQ ID NO: 83718 - DNA, 15 bp, Homo sapiens
ttttgaagggagatg

SEQ ID NO: 83719 - DNA, 15 bp, Homo sapiens
tttgaagggagatga

SEQ ID NO: 83720 - DNA, 15 bp, Homo sapiens
ttgaagggagatgag

SEQ ID NO: 83721 - DNA, 15 bp, Homo sapiens
tgaagggagatgagg

SEQ ID NO: 83722 - DNA, 15 bp, Homo sapiens
gaagggagatgaggc

SEQ ID NO: 83723 - DNA, 15 bp, Homo sapiens
aagggagatgaggca

SEQ ID NO: 83724 - DNA, 15 bp, Homo sapiens
agggagatgaggcag

SEQ ID NO: 83725 - DNA, 15 bp, Homo sapiens
gggagatgaggcagt

SEQ ID NO: 83726 - DNA, 15 bp, Homo sapiens
ggagatgaggcagtc

SEQ ID NO: 83727 - DNA, 15 bp, Homo sapiens
gagatgaggcagtca

SEQ ID NO: 83728 - DNA, 15 bp, Homo sapiens
agatgaggcagtcat

SEQ ID NO: 83729 - DNA, 15 bp, Homo sapiens
gatgaggcagtcata

SEQ ID NO: 83730 - DNA, 15 bp, Homo sapiens
atgaggcagtcatat

SEQ ID NO: 83731 - DNA, 15 bp, Homo sapiens
tgaggcagtcatatt

SEQ ID NO: 83732 - DNA, 15 bp, Homo sapiens
gaggcagtcatattt

SEQ ID NO: 83733 - DNA, 15 bp, Homo sapiens
aggcagtcatatttt

SEQ ID NO: 83734 - DNA, 15 bp, Homo sapiens
ggcagtcatattttg

SEQ ID NO: 83735 - DNA, 15 bp, Homo sapiens
gcagtcatattttgg

SEQ ID NO: 83736 - DNA, 15 bp, Homo sapiens
cagtcatattttggt

SEQ ID NO: 83737 - DNA, 15 bp, Homo sapiens
agtcatattttggta

SEQ ID NO: 83738 - DNA, 15 bp, Homo sapiens
gtcatattttggtaa

SEQ ID NO: 83739 - DNA, 15 bp, Homo sapiens
tcatattttggtaaa

SEQ ID NO: 83740 - DNA, 15 bp, Homo sapiens
catattttggtaaag

SEQ ID NO: 83741 - DNA, 15 bp, Homo sapiens
atattttggtaaaga

SEQ ID NO: 83742 - DNA, 15 bp, Homo sapiens
tattttggtaaagaa

SEQ ID NO: 83743 - DNA, 15 bp, Homo sapiens
attttggtaaagaat

SEQ ID NO: 83744 - DNA, 15 bp, Homo sapiens
ttttggtaaagaatt

SEQ ID NO: 83745 - DNA, 15 bp, Homo sapiens
tttggtaaagaattt

SEQ ID NO: 83746 - DNA, 15 bp, Homo sapiens
ttggtaaagaatttg

SEQ ID NO: 83747 - DNA, 15 bp, Homo sapiens
tggtaaagaatttgt

SEQ ID NO: 83748 - DNA, 15 bp, Homo sapiens
ggtaaagaatttgta

SEQ ID NO: 83749 - DNA, 15 bp, Homo sapiens
gtaaagaatttgtag

SEQ ID NO: 83750 - DNA, 15 bp, Homo sapiens
taaagaatttgtaga

SEQ ID NO: 83751 - DNA, 15 bp, Homo sapiens
aaagaatttgtagac

SEQ ID NO: 83752 - DNA, 15 bp, Homo sapiens
aagaatttgtagact

SEQ ID NO: 83753 - DNA, 15 bp, Homo sapiens
agaatttgtagactt

SEQ ID NO: 83754 - DNA, 15 bp, Homo sapiens
gaatttgtagacttt

SEQ ID NO: 83755 - DNA, 15 bp, Homo sapiens
aatttgtagactttg

SEQ ID NO: 83756 - DNA, 15 bp, Homo sapiens
atttgtagactttgc

SEQ ID NO: 83757 - DNA, 15 bp, Homo sapiens
tttgtagactttgca

SEQ ID NO: 83758 - DNA, 15 bp, Homo sapiens
ttgtagactttgcag

SEQ ID NO: 83759 - DNA, 15 bp, Homo sapiens
tgtagactttgcaga

SEQ ID NO: 83760 - DNA, 15 bp, Homo sapiens
gtagactttgcagag

SEQ ID NO: 83761 - DNA, 15 bp, Homo sapiens
tagactttgcagagg

SEQ ID NO: 83762 - DNA, 15 bp, Homo sapiens
agactttgcagaggt

SEQ ID NO: 83763 - DNA, 15 bp, Homo sapiens
gactttgcagaggtc

SEQ ID NO: 83764 - DNA, 15 bp, Homo sapiens
actttgcagaggtct

SEQ ID NO: 83765 - DNA, 15 bp, Homo sapiens
ctttgcagaggtctc

SEQ ID NO: 83766 - DNA, 15 bp, Homo sapiens
tttgcagaggtctct

SEQ ID NO: 83767 - DNA, 15 bp, Homo sapiens
ttgcagaggtctctt

SEQ ID NO: 83768 - DNA, 15 bp, Homo sapiens
tgcagaggtctcttc

SEQ ID NO: 83769 - DNA, 15 bp, Homo sapiens
gcagaggtctcttca

SEQ ID NO: 83770 - DNA, 15 bp, Homo sapiens
cagaggtctcttcaa

SEQ ID NO: 83771 - DNA, 15 bp, Homo sapiens
agaggtctcttcaaa

SEQ ID NO: 83772 - DNA, 15 bp, Homo sapiens
gaggtctcttcaaaa

SEQ ID NO: 83773 - DNA, 15 bp, Homo sapiens
aggtctcttcaaaat

SEQ ID NO: 83774 - DNA, 15 bp, Homo sapiens
ggtctcttcaaaata

SEQ ID NO: 83775 - DNA, 15 bp, Homo sapiens
gtctcttcaaaataa

SEQ ID NO: 83776 - DNA, 15 bp, Homo sapiens
tctcttcaaaataat

SEQ ID NO: 83777 - DNA, 15 bp, Homo sapiens
ctcttcaaaataatc

SEQ ID NO: 83778 - DNA, 15 bp, Homo sapiens
tcttcaaaataatct

SEQ ID NO: 83779 - DNA, 15 bp, Homo sapiens
cttcaaaataatctg

SEQ ID NO: 83780 - DNA, 15 bp, Homo sapiens
ttcaaaataatctgg

SEQ ID NO: 83781 - DNA, 15 bp, Homo sapiens
tcaaaataatctggc

SEQ ID NO: 83782 - DNA, 15 bp, Homo sapiens
caaaataatctggct

SEQ ID NO: 83783 - DNA, 15 bp, Homo sapiens
aaaataatctggctc

SEQ ID NO: 83784 - DNA, 15 bp, Homo sapiens
aaataatctggctca

SEQ ID NO: 83785 - DNA, 15 bp, Homo sapiens
aataatctggctcag

SEQ ID NO: 83786 - DNA, 15 bp, Homo sapiens
ataatctggctcaga

SEQ ID NO: 83787 - DNA, 15 bp, Homo sapiens
taatctggctcagag

SEQ ID NO: 83788 - DNA, 15 bp, Homo sapiens
aatctggctcagagt

SEQ ID NO: 83789 - DNA, 15 bp, Homo sapiens
atctggctcagagtc

SEQ ID NO: 83790 - DNA, 15 bp, Homo sapiens
tctggctcagagtct

SEQ ID NO: 83791 - DNA, 15 bp, Homo sapiens
ctggctcagagtctt

SEQ ID NO: 83792 - DNA, 15 bp, Homo sapiens
tggctcagagtcttg

SEQ ID NO: 83793 - DNA, 15 bp, Homo sapiens
ggctcagagtcttga

SEQ ID NO: 83794 - DNA, 15 bp, Homo sapiens
gctcagagtcttgac

SEQ ID NO: 83795 - DNA, 15 bp, Homo sapiens
ctcagagtcttgaca

SEQ ID NO: 83796 - DNA, 15 bp, Homo sapiens
tcagagtcttgacat

SEQ ID NO: 83797 - DNA, 15 bp, Homo sapiens
cagagtcttgacata

SEQ ID NO: 83798 - DNA, 15 bp, Homo sapiens
agagtcttgacatat

SEQ ID NO: 83799 - DNA, 15 bp, Homo sapiens
gagtcttgacatatc

SEQ ID NO: 83800 - DNA, 15 bp, Homo sapiens
agtcttgacatatcc

SEQ ID NO: 83801 - DNA, 15 bp, Homo sapiens
gtcttgacatatcct

SEQ ID NO: 83802 - DNA, 15 bp, Homo sapiens
tcttgacatatcctc

SEQ ID NO: 83803 - DNA, 15 bp, Homo sapiens
cttgacatatcctca

SEQ ID NO: 83804 - DNA, 15 bp, Homo sapiens
ttgacatatcctcag

SEQ ID NO: 83805 - DNA, 15 bp, Homo sapiens
tgacatatcctcagc

SEQ ID NO: 83806 - DNA, 15 bp, Homo sapiens
gacatatcctcagca

SEQ ID NO: 83807 - DNA, 15 bp, Homo sapiens
acatatcctcagcag

SEQ ID NO: 83808 - DNA, 15 bp, Homo sapiens
catatcctcagcaga

SEQ ID NO: 83809 - DNA, 15 bp, Homo sapiens
atatcctcagcagac

SEQ ID NO: 83810 - DNA, 15 bp, Homo sapiens
tatcctcagcagaca

SEQ ID NO: 83811 - DNA, 15 bp, Homo sapiens
atcctcagcagacat

SEQ ID NO: 83812 - DNA, 15 bp, Homo sapiens
tcctcagcagacatg

SEQ ID NO: 83813 - DNA, 15 bp, Homo sapiens
cctcagcagacatgg

SEQ ID NO: 83814 - DNA, 15 bp, Homo sapiens
ctcagcagacatggt

SEQ ID NO: 83815 - DNA, 15 bp, Homo sapiens
tcagcagacatggtg

SEQ ID NO: 83816 - DNA, 15 bp, Homo sapiens
cagcagacatggtgc

SEQ ID NO: 83817 - DNA, 15 bp, Homo sapiens
agcagacatggtgca

SEQ ID NO: 83818 - DNA, 15 bp, Homo sapiens
gcagacatggtgcaa

SEQ ID NO: 83819 - DNA, 15 bp, Homo sapiens
cagacatggtgcaaa

SEQ ID NO: 83820 - DNA, 15 bp, Homo sapiens
agacatggtgcaaat

SEQ ID NO: 83821 - DNA, 15 bp, Homo sapiens
gacatggtgcaaatt

SEQ ID NO: 83822 - DNA, 15 bp, Homo sapiens
acatggtgcaaatta

SEQ ID NO: 83823 - DNA, 15 bp, Homo sapiens
catggtgcaaattag

SEQ ID NO: 83824 - DNA, 15 bp, Homo sapiens
atggtgcaaattaga

SEQ ID NO: 83825 - DNA, 15 bp, Homo sapiens
tggtgcaaattagat

SEQ ID NO: 83826 - DNA, 15 bp, Homo sapiens
ggtgcaaattagatg

SEQ ID NO: 83827 - DNA, 15 bp, Homo sapiens
gtgcaaattagatgg

SEQ ID NO: 83828 - DNA, 15 bp, Homo sapiens
tgcaaattagatggc

SEQ ID NO: 83829 - DNA, 15 bp, Homo sapiens
gcaaattagatggca

SEQ ID NO: 83830 - DNA, 15 bp, Homo sapiens
caaattagatggcag

SEQ ID NO: 83831 - DNA, 15 bp, Homo sapiens
aaattagatggcaga

SEQ ID NO: 83832 - DNA, 15 bp, Homo sapiens
aattagatggcagag

SEQ ID NO: 83833 - DNA, 15 bp, Homo sapiens
attagatggcagagt

SEQ ID NO: 83834 - DNA, 15 bp, Homo sapiens
ttagatggcagagtg

SEQ ID NO: 83835 - DNA, 15 bp, Homo sapiens
tagatggcagagtgg

SEQ ID NO: 83836 - DNA, 15 bp, Homo sapiens
agatggcagagtggt

SEQ ID NO: 83837 - DNA, 15 bp, Homo sapiens
gatggcagagtggtg

SEQ ID NO: 83838 - DNA, 15 bp, Homo sapiens
atggcagagtggtgg

SEQ ID NO: 83839 - DNA, 15 bp, Homo sapiens
tggcagagtggtggg

SEQ ID NO: 83840 - DNA, 15 bp, Homo sapiens
ggcagagtggtgggt

SEQ ID NO: 83841 - DNA, 15 bp, Homo sapiens
gcagagtggtgggta

SEQ ID NO: 83842 - DNA, 15 bp, Homo sapiens
cagagtggtgggtac

SEQ ID NO: 83843 - DNA, 15 bp, Homo sapiens
agagtggtgggtaca

SEQ ID NO: 83844 - DNA, 15 bp, Homo sapiens
gagtggtgggtacaa

SEQ ID NO: 83845 - DNA, 15 bp, Homo sapiens
agtggtgggtacaag

SEQ ID NO: 83846 - DNA, 15 bp, Homo sapiens
gtggtgggtacaagt

SEQ ID NO: 83847 - DNA, 15 bp, Homo sapiens
tggtgggtacaagtt

SEQ ID NO: 83848 - DNA, 15 bp, Homo sapiens
ggtgggtacaagttg

SEQ ID NO: 83849 - DNA, 15 bp, Homo sapiens
gtgggtacaagttga

SEQ ID NO: 83850 - DNA, 15 bp, Homo sapiens
tgggtacaagttgac

SEQ ID NO: 83851 - DNA, 15 bp, Homo sapiens
gggtacaagttgacc

SEQ ID NO: 83852 - DNA, 15 bp, Homo sapiens
ggtacaagttgacca

SEQ ID NO: 83853 - DNA, 15 bp, Homo sapiens
gtacaagttgaccat

SEQ ID NO: 83854 - DNA, 15 bp, Homo sapiens
tacaagttgaccata

SEQ ID NO: 83855 - DNA, 15 bp, Homo sapiens
acaagttgaccataa

SEQ ID NO: 83856 - DNA, 15 bp, Homo sapiens
caagttgaccataaa

SEQ ID NO: 83857 - DNA, 15 bp, Homo sapiens
aagttgaccataaaa

SEQ ID NO: 83858 - DNA, 15 bp, Homo sapiens
agttgaccataaaat

SEQ ID NO: 83859 - DNA, 15 bp, Homo sapiens
gttgaccataaaata

SEQ ID NO: 83860 - DNA, 15 bp, Homo sapiens
ttgaccataaaataa

SEQ ID NO: 83861 - DNA, 15 bp, Homo sapiens
tgaccataaaataac

SEQ ID NO: 83862 - DNA, 15 bp, Homo sapiens
gaccataaaataacg

SEQ ID NO: 83863 - DNA, 15 bp, Homo sapiens
accataaaataacgc

SEQ ID NO: 83864 - DNA, 15 bp, Homo sapiens
ccataaaataacgca

SEQ ID NO: 83865 - DNA, 15 bp, Homo sapiens
cataaaataacgcat

SEQ ID NO: 83866 - DNA, 15 bp, Homo sapiens
ataaaataacgcatt

SEQ ID NO: 83867 - DNA, 15 bp, Homo sapiens
taaaataacgcatta

SEQ ID NO: 83868 - DNA, 15 bp, Homo sapiens
aaaataacgcattag

SEQ ID NO: 83869 - DNA, 15 bp, Homo sapiens
aaataacgcattagg

SEQ ID NO: 83870 - DNA, 15 bp, Homo sapiens
aataacgcattaggt

SEQ ID NO: 83871 - DNA, 15 bp, Homo sapiens
ataacgcattaggtt

SEQ ID NO: 83872 - DNA, 15 bp, Homo sapiens
taacgcattaggtta

SEQ ID NO: 83873 - DNA, 15 bp, Homo sapiens
aacgcattaggttag

SEQ ID NO: 83874 - DNA, 15 bp, Homo sapiens
acgcattaggttagt

SEQ ID NO: 83875 - DNA, 15 bp, Homo sapiens
cgcattaggttagta

SEQ ID NO: 83876 - DNA, 15 bp, Homo sapiens
gcattaggttagtaa

SEQ ID NO: 83877 - DNA, 15 bp, Homo sapiens
cattaggttagtaat

SEQ ID NO: 83878 - DNA, 15 bp, Homo sapiens
attaggttagtaatg

SEQ ID NO: 83879 - DNA, 15 bp, Homo sapiens
ttaggttagtaatgc

SEQ ID NO: 83880 - DNA, 15 bp, Homo sapiens
taggttagtaatgcc

SEQ ID NO: 83881 - DNA, 15 bp, Homo sapiens
aggttagtaatgccc

SEQ ID NO: 83882 - DNA, 15 bp, Homo sapiens
ggttagtaatgccca

SEQ ID NO: 83883 - DNA, 15 bp, Homo sapiens
gttagtaatgcccaa

SEQ ID NO: 83884 - DNA, 15 bp, Homo sapiens
ttagtaatgcccaaa

SEQ ID NO: 83885 - DNA, 15 bp, Homo sapiens
tagtaatgcccaaat

SEQ ID NO: 83886 - DNA, 15 bp, Homo sapiens
agtaatgcccaaata

SEQ ID NO: 83887 - DNA, 15 bp, Homo sapiens
gtaatgcccaaataa

SEQ ID NO: 83888 - DNA, 15 bp, Homo sapiens
taatgcccaaataat

SEQ ID NO: 83889 - DNA, 15 bp, Homo sapiens
aatgcccaaataata

SEQ ID NO: 83890 - DNA, 15 bp, Homo sapiens
atgcccaaataatac

SEQ ID NO: 83891 - DNA, 15 bp, Homo sapiens
tgcccaaataatact

SEQ ID NO: 83892 - DNA, 15 bp, Homo sapiens
gcccaaataatactt

SEQ ID NO: 83893 - DNA, 15 bp, Homo sapiens
cccaaataatacttt

SEQ ID NO: 83894 - DNA, 15 bp, Homo sapiens
ccaaataatactttg

SEQ ID NO: 83895 - DNA, 15 bp, Homo sapiens
caaataatactttgg

SEQ ID NO: 83896 - DNA, 15 bp, Homo sapiens
aaataatactttggg

SEQ ID NO: 83897 - DNA, 15 bp, Homo sapiens
aataatactttgggt

SEQ ID NO: 83898 - DNA, 15 bp, Homo sapiens
ataatactttgggtt

SEQ ID NO: 83899 - DNA, 15 bp, Homo sapiens
taatactttgggttt

SEQ ID NO: 83900 - DNA, 15 bp, Homo sapiens
aatactttgggtttt

SEQ ID NO: 83901 - DNA, 15 bp, Homo sapiens
atactttgggttttc

SEQ ID NO: 83902 - DNA, 15 bp, Homo sapiens
tactttgggttttca

SEQ ID NO: 83903 - DNA, 15 bp, Homo sapiens
actttgggttttcag

SEQ ID NO: 83904 - DNA, 15 bp, Homo sapiens
ctttgggttttcagt

SEQ ID NO: 83905 - DNA, 15 bp, Homo sapiens
tttgggttttcagtg

SEQ ID NO: 83906 - DNA, 15 bp, Homo sapiens
ttgggttttcagtgt

SEQ ID NO: 83907 - DNA, 15 bp, Homo sapiens
tgggttttcagtgtt

SEQ ID NO: 83908 - DNA, 15 bp, Homo sapiens
gggttttcagtgttg

SEQ ID NO: 83909 - DNA, 15 bp, Homo sapiens
ggttttcagtgttgc

SEQ ID NO: 83910 - DNA, 15 bp, Homo sapiens
gttttcagtgttgca

SEQ ID NO: 83911 - DNA, 15 bp, Homo sapiens
ttttcagtgttgcag

SEQ ID NO: 83912 - DNA, 15 bp, Homo sapiens
tttcagtgttgcaga

SEQ ID NO: 83913 - DNA, 15 bp, Homo sapiens
ttcagtgttgcagag

SEQ ID NO: 83914 - DNA, 15 bp, Homo sapiens
tcagtgttgcagaga

SEQ ID NO: 83915 - DNA, 15 bp, Homo sapiens
cagtgttgcagagaa

SEQ ID NO: 83916 - DNA, 15 bp, Homo sapiens
agtgttgcagagaag

SEQ ID NO: 83917 - DNA, 15 bp, Homo sapiens
gtgttgcagagaagt

SEQ ID NO: 83918 - DNA, 15 bp, Homo sapiens
tgttgcagagaagtc

SEQ ID NO: 83919 - DNA, 15 bp, Homo sapiens
gttgcagagaagtca

SEQ ID NO: 83920 - DNA, 15 bp, Homo sapiens
ttgcagagaagtcag

SEQ ID NO: 83921 - DNA, 15 bp, Homo sapiens
tgcagagaagtcaga

SEQ ID NO: 83922 - DNA, 15 bp, Homo sapiens
gcagagaagtcagac

SEQ ID NO: 83923 - DNA, 15 bp, Homo sapiens
cagagaagtcagaca

SEQ ID NO: 83924 - DNA, 15 bp, Homo sapiens
agagaagtcagacaa

SEQ ID NO: 83925 - DNA, 15 bp, Homo sapiens
gagaagtcagacaac

SEQ ID NO: 83926 - DNA, 15 bp, Homo sapiens
agaagtcagacaact

SEQ ID NO: 83927 - DNA, 15 bp, Homo sapiens
gaagtcagacaactg

SEQ ID NO: 83928 - DNA, 15 bp, Homo sapiens
aagtcagacaactga

SEQ ID NO: 83929 - DNA, 15 bp, Homo sapiens
agtcagacaactgat

SEQ ID NO: 83930 - DNA, 15 bp, Homo sapiens
gtcagacaactgata

SEQ ID NO: 83931 - DNA, 15 bp, Homo sapiens
tcagacaactgatag

SEQ ID NO: 83932 - DNA, 15 bp, Homo sapiens
cagacaactgatagt

SEQ ID NO: 83933 - DNA, 15 bp, Homo sapiens
agacaactgatagtt

SEQ ID NO: 83934 - DNA, 15 bp, Homo sapiens
gacaactgatagtta

SEQ ID NO: 83935 - DNA, 15 bp, Homo sapiens
acaactgatagttat

SEQ ID NO: 83936 - DNA, 15 bp, Homo sapiens
caactgatagttatt

SEQ ID NO: 83937 - DNA, 15 bp, Homo sapiens
aactgatagttatta

SEQ ID NO: 83938 - DNA, 15 bp, Homo sapiens
actgatagttattat

SEQ ID NO: 83939 - DNA, 15 bp, Homo sapiens
ctgatagttattata

SEQ ID NO: 83940 - DNA, 15 bp, Homo sapiens
tgatagttattataa

SEQ ID NO: 83941 - DNA, 15 bp, Homo sapiens
gatagttattataaa

SEQ ID NO: 83942 - DNA, 15 bp, Homo sapiens
atagttattataaag

SEQ ID NO: 83943 - DNA, 15 bp, Homo sapiens
tagttattataaaga

SEQ ID NO: 83944 - DNA, 15 bp, Homo sapiens
agttattataaagaa

SEQ ID NO: 83945 - DNA, 15 bp, Homo sapiens
gttattataaagaaa

SEQ ID NO: 83946 - DNA, 15 bp, Homo sapiens
ttattataaagaaaa

SEQ ID NO: 83947 - DNA, 15 bp, Homo sapiens
tattataaagaaaaa

SEQ ID NO: 83948 - DNA, 15 bp, Homo sapiens
attataaagaaaaat

SEQ ID NO: 83949 - DNA, 15 bp, Homo sapiens
ttataaagaaaaatg

SEQ ID NO: 83950 - DNA, 15 bp, Homo sapiens
tataaagaaaaatgt

SEQ ID NO: 83951 - DNA, 15 bp, Homo sapiens
ataaagaaaaatgtt

SEQ ID NO: 83952 - DNA, 15 bp, Homo sapiens
taaagaaaaatgttc

SEQ ID NO: 83953 - DNA, 15 bp, Homo sapiens
aaagaaaaatgttct

SEQ ID NO: 83954 - DNA, 15 bp, Homo sapiens
aagaaaaatgttctg

SEQ ID NO: 83955 - DNA, 15 bp, Homo sapiens
agaaaaatgttctga

SEQ ID NO: 83956 - DNA, 15 bp, Homo sapiens
gaaaaatgttctgag

SEQ ID NO: 83957 - DNA, 15 bp, Homo sapiens
aaaaatgttctgaga

SEQ ID NO: 83958 - DNA, 15 bp, Homo sapiens
aaaatgttctgagag

SEQ ID NO: 83959 - DNA, 15 bp, Homo sapiens
aaatgttctgagagt

SEQ ID NO: 83960 - DNA, 15 bp, Homo sapiens
aatgttctgagagtg

SEQ ID NO: 83961 - DNA, 15 bp, Homo sapiens
atgttctgagagtga

SEQ ID NO: 83962 - DNA, 15 bp, Homo sapiens
tgttctgagagtgag

SEQ ID NO: 83963 - DNA, 15 bp, Homo sapiens
gttctgagagtgagg

SEQ ID NO: 83964 - DNA, 15 bp, Homo sapiens
ttctgagagtgaggt

SEQ ID NO: 83965 - DNA, 15 bp, Homo sapiens
tctgagagtgaggta

SEQ ID NO: 83966 - DNA, 15 bp, Homo sapiens
ctgagagtgaggtaa

SEQ ID NO: 83967 - DNA, 15 bp, Homo sapiens
tgagagtgaggtaac

SEQ ID NO: 83968 - DNA, 15 bp, Homo sapiens
gagagtgaggtaacc

SEQ ID NO: 83969 - DNA, 15 bp, Homo sapiens
agagtgaggtaaccg

SEQ ID NO: 83970 - DNA, 15 bp, Homo sapiens
gagtgaggtaaccgc

SEQ ID NO: 83971 - DNA, 15 bp, Homo sapiens
agtgaggtaaccgct

SEQ ID NO: 83972 - DNA, 15 bp, Homo sapiens
gtgaggtaaccgctt

SEQ ID NO: 83973 - DNA, 15 bp, Homo sapiens
tgaggtaaccgctta

SEQ ID NO: 83974 - DNA, 15 bp, Homo sapiens
gaggtaaccgcttaa

SEQ ID NO: 83975 - DNA, 15 bp, Homo sapiens
aggtaaccgcttaag

SEQ ID NO: 83976 - DNA, 15 bp, Homo sapiens
ggtaaccgcttaagg

SEQ ID NO: 83977 - DNA, 15 bp, Homo sapiens
gtaaccgcttaaggg

SEQ ID NO: 83978 - DNA, 15 bp, Homo sapiens
taaccgcttaaggga

SEQ ID NO: 83979 - DNA, 15 bp, Homo sapiens
aaccgcttaagggaa

SEQ ID NO: 83980 - DNA, 15 bp, Homo sapiens
accgcttaagggaag

SEQ ID NO: 83981 - DNA, 15 bp, Homo sapiens
ccgcttaagggaagg

SEQ ID NO: 83982 - DNA, 15 bp, Homo sapiens
cgcttaagggaagga

SEQ ID NO: 83983 - DNA, 15 bp, Homo sapiens
gcttaagggaaggaa

SEQ ID NO: 83984 - DNA, 15 bp, Homo sapiens
cttaagggaaggaag

SEQ ID NO: 83985 - DNA, 15 bp, Homo sapiens
ttaagggaaggaagc

SEQ ID NO: 83986 - DNA, 15 bp, Homo sapiens
taagggaaggaagcc

SEQ ID NO: 83987 - DNA, 15 bp, Homo sapiens
aagggaaggaagcct

SEQ ID NO: 83988 - DNA, 15 bp, Homo sapiens
agggaaggaagcctc

SEQ ID NO: 83989 - DNA, 15 bp, Homo sapiens
gggaaggaagcctcc

SEQ ID NO: 83990 - DNA, 15 bp, Homo sapiens
ggaaggaagcctcct

SEQ ID NO: 83991 - DNA, 15 bp, Homo sapiens
gaaggaagcctcctt

SEQ ID NO: 83992 - DNA, 15 bp, Homo sapiens
aaggaagcctccttc

SEQ ID NO: 83993 - DNA, 15 bp, Homo sapiens
aggaagcctccttct

SEQ ID NO: 83994 - DNA, 15 bp, Homo sapiens
ggaagcctccttctg

SEQ ID NO: 83995 - DNA, 15 bp, Homo sapiens
gaagcctccttctgt

SEQ ID NO: 83996 - DNA, 15 bp, Homo sapiens
aagcctccttctgtc

SEQ ID NO: 83997 - DNA, 15 bp, Homo sapiens
agcctccttctgtct

SEQ ID NO: 83998 - DNA, 15 bp, Homo sapiens
gcctccttctgtctt

SEQ ID NO: 83999 - DNA, 15 bp, Homo sapiens
cctccttctgtctta

SEQ ID NO: 84000 - DNA, 15 bp, Homo sapiens
ctccttctgtcttat

SEQ ID NO: 84001 - DNA, 15 bp, Homo sapiens
tccttctgtcttatt

SEQ ID NO: 84002 - DNA, 15 bp, Homo sapiens
ccttctgtcttattc

SEQ ID NO: 84003 - DNA, 15 bp, Homo sapiens
ttctgtcttattcac

SEQ ID NO: 84004 - DNA, 15 bp, Homo sapiens
tctgtcttattcact

SEQ ID NO: 84005 - DNA, 15 bp, Homo sapiens
ctgtcttattcacta

SEQ ID NO: 84006 - DNA, 15 bp, Homo sapiens
tgtcttattcactaa

SEQ ID NO: 84007 - DNA, 15 bp, Homo sapiens
gtcttattcactaat

SEQ ID NO: 84008 - DNA, 15 bp, Homo sapiens
tcttattcactaatt

SEQ ID NO: 84009 - DNA, 15 bp, Homo sapiens
cttattcactaattt

SEQ ID NO: 84010 - DNA, 15 bp, Homo sapiens
ttattcactaattta

SEQ ID NO: 84011 - DNA, 15 bp, Homo sapiens
tattcactaatttac

SEQ ID NO: 84012 - DNA, 15 bp, Homo sapiens
attcactaatttaca

SEQ ID NO: 84013 - DNA, 15 bp, Homo sapiens
ttcactaatttacaa

SEQ ID NO: 84014 - DNA, 15 bp, Homo sapiens
tcactaatttacaag

SEQ ID NO: 84015 - DNA, 15 bp, Homo sapiens
cactaatttacaaga

SEQ ID NO: 84016 - DNA, 15 bp, Homo sapiens
actaatttacaagaa

SEQ ID NO: 84017 - DNA, 15 bp, Homo sapiens
ctaatttacaagaag

SEQ ID NO: 84018 - DNA, 15 bp, Homo sapiens
taatttacaagaaga

SEQ ID NO: 84019 - DNA, 15 bp, Homo sapiens
aatttacaagaagat

SEQ ID NO: 84020 - DNA, 15 bp, Homo sapiens
atttacaagaagata

SEQ ID NO: 84021 - DNA, 15 bp, Homo sapiens
tttacaagaagataa

SEQ ID NO: 84022 - DNA, 15 bp, Homo sapiens
ttacaagaagataat

SEQ ID NO: 84023 - DNA, 15 bp, Homo sapiens
tacaagaagataatt

SEQ ID NO: 84024 - DNA, 15 bp, Homo sapiens
acaagaagataattg

SEQ ID NO: 84025 - DNA, 15 bp, Homo sapiens
caagaagataattgt

SEQ ID NO: 84026 - DNA, 15 bp, Homo sapiens
aagaagataattgtg

SEQ ID NO: 84027 - DNA, 15 bp, Homo sapiens
agaagataattgtgt

SEQ ID NO: 84028 - DNA, 15 bp, Homo sapiens
gaagataattgtgtt

SEQ ID NO: 84029 - DNA, 15 bp, Homo sapiens
aagataattgtgtta

SEQ ID NO: 84030 - DNA, 15 bp, Homo sapiens
agataattgtgttac

SEQ ID NO: 84031 - DNA, 15 bp, Homo sapiens
gataattgtgttaca

SEQ ID NO: 84032 - DNA, 15 bp, Homo sapiens
ataattgtgttacac

SEQ ID NO: 84033 - DNA, 15 bp, Homo sapiens
taattgtgttacact

SEQ ID NO: 84034 - DNA, 15 bp, Homo sapiens
aattgtgttacactt

SEQ ID NO: 84035 - DNA, 15 bp, Homo sapiens
attgtgttacacttc

SEQ ID NO: 84036 - DNA, 15 bp, Homo sapiens
ttgtgttacacttcc

SEQ ID NO: 84037 - DNA, 15 bp, Homo sapiens
tgtgttacacttcct

SEQ ID NO: 84038 - DNA, 15 bp, Homo sapiens
gtgttacacttcctt

SEQ ID NO: 84039 - DNA, 15 bp, Homo sapiens
tgttacacttcctta

SEQ ID NO: 84040 - DNA, 15 bp, Homo sapiens
gttacacttccttag

SEQ ID NO: 84041 - DNA, 15 bp, Homo sapiens
ttacacttccttagg

SEQ ID NO: 84042 - DNA, 15 bp, Homo sapiens
tacacttccttagga

SEQ ID NO: 84043 - DNA, 15 bp, Homo sapiens
acacttccttaggag

SEQ ID NO: 84044 - DNA, 15 bp, Homo sapiens
cacttccttaggagt

SEQ ID NO: 84045 - DNA, 15 bp, Homo sapiens
acttccttaggagtc

SEQ ID NO: 84046 - DNA, 15 bp, Homo sapiens
cttccttaggagtca

SEQ ID NO: 84047 - DNA, 15 bp, Homo sapiens
ttccttaggagtcat

SEQ ID NO: 84048 - DNA, 15 bp, Homo sapiens
tccttaggagtcatt

SEQ ID NO: 84049 - DNA, 15 bp, Homo sapiens
ccttaggagtcattc

SEQ ID NO: 84050 - DNA, 15 bp, Homo sapiens
cttaggagtcattca

SEQ ID NO: 84051 - DNA, 15 bp, Homo sapiens
ttaggagtcattcat

SEQ ID NO: 84052 - DNA, 15 bp, Homo sapiens
taggagtcattcatt

SEQ ID NO: 84053 - DNA, 15 bp, Homo sapiens
aggagtcattcattt

SEQ ID NO: 84054 - DNA, 15 bp, Homo sapiens
ggagtcattcatttg

SEQ ID NO: 84055 - DNA, 15 bp, Homo sapiens
gagtcattcatttgt

SEQ ID NO: 84056 - DNA, 15 bp, Homo sapiens
agtcattcatttgta

SEQ ID NO: 84057 - DNA, 15 bp, Homo sapiens
gtcattcatttgtat

SEQ ID NO: 84058 - DNA, 15 bp, Homo sapiens
tcattcatttgtata

SEQ ID NO: 84059 - DNA, 15 bp, Homo sapiens
cattcatttgtatat

SEQ ID NO: 84060 - DNA, 15 bp, Homo sapiens
attcatttgtatatt

SEQ ID NO: 84061 - DNA, 15 bp, Homo sapiens
ttcatttgtatattt

SEQ ID NO: 84062 - DNA, 15 bp, Homo sapiens
tcatttgtatatttg

SEQ ID NO: 84063 - DNA, 15 bp, Homo sapiens
catttgtatatttga

SEQ ID NO: 84064 - DNA, 15 bp, Homo sapiens
atttgtatatttgac

SEQ ID NO: 84065 - DNA, 15 bp, Homo sapiens
tttgtatatttgaca

SEQ ID NO: 84066 - DNA, 15 bp, Homo sapiens
ttgtatatttgacac

SEQ ID NO: 84067 - DNA, 15 bp, Homo sapiens
tgtatatttgacact

SEQ ID NO: 84068 - DNA, 15 bp, Homo sapiens
gtatatttgacactt

SEQ ID NO: 84069 - DNA, 15 bp, Homo sapiens
tatatttgacacttt

SEQ ID NO: 84070 - DNA, 15 bp, Homo sapiens
atatttgacactttt

SEQ ID NO: 84071 - DNA, 15 bp, Homo sapiens
tatttgacacttttg

SEQ ID NO: 84072 - DNA, 15 bp, Homo sapiens
atttgacacttttgc

SEQ ID NO: 84073 - DNA, 15 bp, Homo sapiens
tttgacacttttgct

SEQ ID NO: 84074 - DNA, 15 bp, Homo sapiens
ttgacacttttgctt

SEQ ID NO: 84075 - DNA, 15 bp, Homo sapiens
tgacacttttgcttt

SEQ ID NO: 84076 - DNA, 15 bp, Homo sapiens
gacacttttgcttta

SEQ ID NO: 84077 - DNA, 15 bp, Homo sapiens
acacttttgctttat

SEQ ID NO: 84078 - DNA, 15 bp, Homo sapiens
cacttttgctttatg

SEQ ID NO: 84079 - DNA, 15 bp, Homo sapiens
acttttgctttatga

SEQ ID NO: 84080 - DNA, 15 bp, Homo sapiens
cttttgctttatgaa

SEQ ID NO: 84081 - DNA, 15 bp, Homo sapiens
ttttgctttatgaac

SEQ ID NO: 84082 - DNA, 15 bp, Homo sapiens
tttgctttatgaaca

SEQ ID NO: 84083 - DNA, 15 bp, Homo sapiens
ttgctttatgaacat

SEQ ID NO: 84084 - DNA, 15 bp, Homo sapiens
tgctttatgaacatg

SEQ ID NO: 84085 - DNA, 15 bp, Homo sapiens
gctttatgaacatgt

SEQ ID NO: 84086 - DNA, 15 bp, Homo sapiens
ctttatgaacatgtg

SEQ ID NO: 84087 - DNA, 15 bp, Homo sapiens
tttatgaacatgtga

SEQ ID NO: 84088 - DNA, 15 bp, Homo sapiens
ttatgaacatgtgaa

SEQ ID NO: 84089 - DNA, 15 bp, Homo sapiens
tatgaacatgtgaag

SEQ ID NO: 84090 - DNA, 15 bp, Homo sapiens
atgaacatgtgaaga

SEQ ID NO: 84091 - DNA, 15 bp, Homo sapiens
tgaacatgtgaagat

SEQ ID NO: 84092 - DNA, 15 bp, Homo sapiens
gaacatgtgaagatt

SEQ ID NO: 84093 - DNA, 15 bp, Homo sapiens
aacatgtgaagatta

SEQ ID NO: 84094 - DNA, 15 bp, Homo sapiens
acatgtgaagattat

SEQ ID NO: 84095 - DNA, 15 bp, Homo sapiens
catgtgaagattatt

SEQ ID NO: 84096 - DNA, 15 bp, Homo sapiens
atgtgaagattattc

SEQ ID NO: 84097 - DNA, 15 bp, Homo sapiens
tgtgaagattattca

SEQ ID NO: 84098 - DNA, 15 bp, Homo sapiens
gtgaagattattcaa

SEQ ID NO: 84099 - DNA, 15 bp, Homo sapiens
tgaagattattcaaa

SEQ ID NO: 84100 - DNA, 15 bp, Homo sapiens
gaagattattcaaaa

SEQ ID NO: 84101 - DNA, 15 bp, Homo sapiens
aagattattcaaaag

SEQ ID NO: 84102 - DNA, 15 bp, Homo sapiens
agattattcaaaagt

SEQ ID NO: 84103 - DNA, 15 bp, Homo sapiens
gattattcaaaagta

SEQ ID NO: 84104 - DNA, 15 bp, Homo sapiens
attattcaaaagtaa

SEQ ID NO: 84105 - DNA, 15 bp, Homo sapiens
ttattcaaaagtaag

SEQ ID NO: 84106 - DNA, 15 bp, Homo sapiens
tattcaaaagtaagc

SEQ ID NO: 84107 - DNA, 15 bp, Homo sapiens
attcaaaagtaagct

SEQ ID NO: 84108 - DNA, 15 bp, Homo sapiens
ttcaaaagtaagctg

SEQ ID NO: 84109 - DNA, 15 bp, Homo sapiens
tcaaaagtaagctgt

SEQ ID NO: 84110 - DNA, 15 bp, Homo sapiens
caaaagtaagctgtt

SEQ ID NO: 84111 - DNA, 15 bp, Homo sapiens
aaaagtaagctgttg

SEQ ID NO: 84112 - DNA, 15 bp, Homo sapiens
aaagtaagctgttgg

SEQ ID NO: 84113 - DNA, 15 bp, Homo sapiens
aagtaagctgttggt

SEQ ID NO: 84114 - DNA, 15 bp, Homo sapiens
agtaagctgttggtg

SEQ ID NO: 84115 - DNA, 15 bp, Homo sapiens
gtaagctgttggtga

SEQ ID NO: 84116 - DNA, 15 bp, Homo sapiens
taagctgttggtgat

SEQ ID NO: 84117 - DNA, 15 bp, Homo sapiens
aagctgttggtgatt

SEQ ID NO: 84118 - DNA, 15 bp, Homo sapiens
agctgttggtgattt

SEQ ID NO: 84119 - DNA, 15 bp, Homo sapiens
gctgttggtgatttt

SEQ ID NO: 84120 - DNA, 15 bp, Homo sapiens
ctgttggtgattttt

SEQ ID NO: 84121 - DNA, 15 bp, Homo sapiens
tgttggtgatttttt

SEQ ID NO: 84122 - DNA, 15 bp, Homo sapiens
gttggtgattttttt

SEQ ID NO: 84123 - DNA, 15 bp, Homo sapiens
ttggtgatttttttc

SEQ ID NO: 84124 - DNA, 15 bp, Homo sapiens
tggtgatttttttct

SEQ ID NO: 84125 - DNA, 15 bp, Homo sapiens
ggtgatttttttctt

SEQ ID NO: 84126 - DNA, 15 bp, Homo sapiens
gtgatttttttcttc

SEQ ID NO: 84127 - DNA, 15 bp, Homo sapiens
tgatttttttcttcc

SEQ ID NO: 84128 - DNA, 15 bp, Homo sapiens
gatttttttcttcca

SEQ ID NO: 84129 - DNA, 15 bp, Homo sapiens
atttttttcttccaa

SEQ ID NO: 84130 - DNA, 15 bp, Homo sapiens
tttttttcttccaag

SEQ ID NO: 84131 - DNA, 15 bp, Homo sapiens
ttttttcttccaaga

SEQ ID NO: 84132 - DNA, 15 bp, Homo sapiens
tttttcttccaagaa

SEQ ID NO: 84133 - DNA, 15 bp, Homo sapiens
ttttcttccaagaaa

SEQ ID NO: 84134 - DNA, 15 bp, Homo sapiens
tttcttccaagaaag

SEQ ID NO: 84135 - DNA, 15 bp, Homo sapiens
ttcttccaagaaagc

SEQ ID NO: 84136 - DNA, 15 bp, Homo sapiens
tcttccaagaaagca

SEQ ID NO: 84137 - DNA, 15 bp, Homo sapiens
cttccaagaaagcat

SEQ ID NO: 84138 - DNA, 15 bp, Homo sapiens
ttccaagaaagcatg

SEQ ID NO: 84139 - DNA, 15 bp, Homo sapiens
tccaagaaagcatgc

SEQ ID NO: 84140 - DNA, 15 bp, Homo sapiens
ccaagaaagcatgcc

SEQ ID NO: 84141 - DNA, 15 bp, Homo sapiens
caagaaagcatgcca

SEQ ID NO: 84142 - DNA, 15 bp, Homo sapiens
aagaaagcatgccac

SEQ ID NO: 84143 - DNA, 15 bp, Homo sapiens
agaaagcatgccaca

SEQ ID NO: 84144 - DNA, 15 bp, Homo sapiens
gaaagcatgccacag

SEQ ID NO: 84145 - DNA, 15 bp, Homo sapiens
aaagcatgccacagg

SEQ ID NO: 84146 - DNA, 15 bp, Homo sapiens
aagcatgccacaggg

SEQ ID NO: 84147 - DNA, 15 bp, Homo sapiens
agcatgccacagggc

SEQ ID NO: 84148 - DNA, 15 bp, Homo sapiens
gcatgccacagggca

SEQ ID NO: 84149 - DNA, 15 bp, Homo sapiens
catgccacagggcaa

SEQ ID NO: 84150 - DNA, 15 bp, Homo sapiens
atgccacagggcaac

SEQ ID NO: 84151 - DNA, 15 bp, Homo sapiens
tgccacagggcaact

SEQ ID NO: 84152 - DNA, 15 bp, Homo sapiens
gccacagggcaactt

SEQ ID NO: 84153 - DNA, 15 bp, Homo sapiens
ccacagggcaacttc

SEQ ID NO: 84154 - DNA, 15 bp, Homo sapiens
cacagggcaacttct

SEQ ID NO: 84155 - DNA, 15 bp, Homo sapiens
acagggcaacttcta

SEQ ID NO: 84156 - DNA, 15 bp, Homo sapiens
cagggcaacttctag

SEQ ID NO: 84157 - DNA, 15 bp, Homo sapiens
agggcaacttctagg

SEQ ID NO: 84158 - DNA, 15 bp, Homo sapiens
gggcaacttctaggg

SEQ ID NO: 84159 - DNA, 15 bp, Homo sapiens
ggcaacttctagggt

SEQ ID NO: 84160 - DNA, 15 bp, Homo sapiens
gcaacttctagggtt

SEQ ID NO: 84161 - DNA, 15 bp, Homo sapiens
caacttctagggttg

SEQ ID NO: 84162 - DNA, 15 bp, Homo sapiens
aacttctagggttgg

SEQ ID NO: 84163 - DNA, 15 bp, Homo sapiens
acttctagggttggt

SEQ ID NO: 84164 - DNA, 15 bp, Homo sapiens
cttctagggttggtt

SEQ ID NO: 84165 - DNA, 15 bp, Homo sapiens
ttctagggttggttc

SEQ ID NO: 84166 - DNA, 15 bp, Homo sapiens
tctagggttggttct

SEQ ID NO: 84167 - DNA, 15 bp, Homo sapiens
ctagggttggttctc

SEQ ID NO: 84168 - DNA, 15 bp, Homo sapiens
tagggttggttctca

SEQ ID NO: 84169 - DNA, 15 bp, Homo sapiens
agggttggttctcat

SEQ ID NO: 84170 - DNA, 15 bp, Homo sapiens
gggttggttctcatc

SEQ ID NO: 84171 - DNA, 15 bp, Homo sapiens
ggttggttctcatct

SEQ ID NO: 84172 - DNA, 15 bp, Homo sapiens
gttggttctcatcta

SEQ ID NO: 84173 - DNA, 15 bp, Homo sapiens
ttggttctcatctag

SEQ ID NO: 84174 - DNA, 15 bp, Homo sapiens
tggttctcatctagt

SEQ ID NO: 84175 - DNA, 15 bp, Homo sapiens
ggttctcatctagtc

SEQ ID NO: 84176 - DNA, 15 bp, Homo sapiens
gttctcatctagtcc

SEQ ID NO: 84177 - DNA, 15 bp, Homo sapiens
ttctcatctagtcct

SEQ ID NO: 84178 - DNA, 15 bp, Homo sapiens
tctcatctagtcctg

SEQ ID NO: 84179 - DNA, 15 bp, Homo sapiens
ctcatctagtcctgt

SEQ ID NO: 84180 - DNA, 15 bp, Homo sapiens
tcatctagtcctgtg

SEQ ID NO: 84181 - DNA, 15 bp, Homo sapiens
catctagtcctgtgc

SEQ ID NO: 84182 - DNA, 15 bp, Homo sapiens
atctagtcctgtgct

SEQ ID NO: 84183 - DNA, 15 bp, Homo sapiens
tctagtcctgtgctc

SEQ ID NO: 84184 - DNA, 15 bp, Homo sapiens
ctagtcctgtgctcc

SEQ ID NO: 84185 - DNA, 15 bp, Homo sapiens
tagtcctgtgctcca

SEQ ID NO: 84186 - DNA, 15 bp, Homo sapiens
agtcctgtgctccac

SEQ ID NO: 84187 - DNA, 15 bp, Homo sapiens
gtcctgtgctccaca

SEQ ID NO: 84188 - DNA, 15 bp, Homo sapiens
tcctgtgctccacac

SEQ ID NO: 84189 - DNA, 15 bp, Homo sapiens
cctgtgctccacact

SEQ ID NO: 84190 - DNA, 15 bp, Homo sapiens
ctgtgctccacacta

SEQ ID NO: 84191 - DNA, 15 bp, Homo sapiens
tgtgctccacactat

SEQ ID NO: 84192 - DNA, 15 bp, Homo sapiens
gtgctccacactatc

SEQ ID NO: 84193 - DNA, 15 bp, Homo sapiens
tgctccacactatct

SEQ ID NO: 84194 - DNA, 15 bp, Homo sapiens
gctccacactatctg

SEQ ID NO: 84195 - DNA, 15 bp, Homo sapiens
ctccacactatctgc

SEQ ID NO: 84196 - DNA, 15 bp, Homo sapiens
tccacactatctgca

SEQ ID NO: 84197 - DNA, 15 bp, Homo sapiens
ccacactatctgcat

SEQ ID NO: 84198 - DNA, 15 bp, Homo sapiens
cacactatctgcatc

SEQ ID NO: 84199 - DNA, 15 bp, Homo sapiens
acactatctgcatct

SEQ ID NO: 84200 - DNA, 15 bp, Homo sapiens
cactatctgcatctg

SEQ ID NO: 84201 - DNA, 15 bp, Homo sapiens
actatctgcatctgc

SEQ ID NO: 84202 - DNA, 15 bp, Homo sapiens
ctatctgcatctgca

SEQ ID NO: 84203 - DNA, 15 bp, Homo sapiens
tatctgcatctgcac

SEQ ID NO: 84204 - DNA, 15 bp, Homo sapiens
atctgcatctgcact

SEQ ID NO: 84205 - DNA, 15 bp, Homo sapiens
tctgcatctgcactt

SEQ ID NO: 84206 - DNA, 15 bp, Homo sapiens
ctgcatctgcactta

SEQ ID NO: 84207 - DNA, 15 bp, Homo sapiens
tgcatctgcacttaa

SEQ ID NO: 84208 - DNA, 15 bp, Homo sapiens
gcatctgcacttaag

SEQ ID NO: 84209 - DNA, 15 bp, Homo sapiens
catctgcacttaagt

SEQ ID NO: 84210 - DNA, 15 bp, Homo sapiens
atctgcacttaagtt

SEQ ID NO: 84211 - DNA, 15 bp, Homo sapiens
tctgcacttaagttt

SEQ ID NO: 84212 - DNA, 15 bp, Homo sapiens
ctgcacttaagtttc

SEQ ID NO: 84213 - DNA, 15 bp, Homo sapiens
tgcacttaagtttca

SEQ ID NO: 84214 - DNA, 15 bp, Homo sapiens
gcacttaagtttcaa

SEQ ID NO: 84215 - DNA, 15 bp, Homo sapiens
cacttaagtttcaat

SEQ ID NO: 84216 - DNA, 15 bp, Homo sapiens
acttaagtttcaata

SEQ ID NO: 84217 - DNA, 15 bp, Homo sapiens
cttaagtttcaatat

SEQ ID NO: 84218 - DNA, 15 bp, Homo sapiens
ttaagtttcaatatt

SEQ ID NO: 84219 - DNA, 15 bp, Homo sapiens
taagtttcaatatta

SEQ ID NO: 84220 - DNA, 15 bp, Homo sapiens
aagtttcaatattag

SEQ ID NO: 84221 - DNA, 15 bp, Homo sapiens
agtttcaatattaga

SEQ ID NO: 84222 - DNA, 15 bp, Homo sapiens
gtttcaatattagat

SEQ ID NO: 84223 - DNA, 15 bp, Homo sapiens
tttcaatattagata

SEQ ID NO: 84224 - DNA, 15 bp, Homo sapiens
ttcaatattagataa

SEQ ID NO: 84225 - DNA, 15 bp, Homo sapiens
tcaatattagataac

SEQ ID NO: 84226 - DNA, 15 bp, Homo sapiens
caatattagataact

SEQ ID NO: 84227 - DNA, 15 bp, Homo sapiens
aatattagataactc

SEQ ID NO: 84228 - DNA, 15 bp, Homo sapiens
atattagataactca

SEQ ID NO: 84229 - DNA, 15 bp, Homo sapiens
tattagataactcac

SEQ ID NO: 84230 - DNA, 15 bp, Homo sapiens
attagataactcaca

SEQ ID NO: 84231 - DNA, 15 bp, Homo sapiens
ttagataactcacat

SEQ ID NO: 84232 - DNA, 15 bp, Homo sapiens
tagataactcacatg

SEQ ID NO: 84233 - DNA, 15 bp, Homo sapiens
agataactcacatgt

SEQ ID NO: 84234 - DNA, 15 bp, Homo sapiens
gataactcacatgtt

SEQ ID NO: 84235 - DNA, 15 bp, Homo sapiens
ataactcacatgttt

SEQ ID NO: 84236 - DNA, 15 bp, Homo sapiens
taactcacatgttta

SEQ ID NO: 84237 - DNA, 15 bp, Homo sapiens
aactcacatgtttaa

SEQ ID NO: 84238 - DNA, 15 bp, Homo sapiens
actcacatgtttaaa

SEQ ID NO: 84239 - DNA, 15 bp, Homo sapiens
ctcacatgtttaaac

SEQ ID NO: 84240 - DNA, 15 bp, Homo sapiens
tcacatgtttaaact

SEQ ID NO: 84241 - DNA, 15 bp, Homo sapiens
cacatgtttaaacta

SEQ ID NO: 84242 - DNA, 15 bp, Homo sapiens
acatgtttaaactat

SEQ ID NO: 84243 - DNA, 15 bp, Homo sapiens
catgtttaaactatg

SEQ ID NO: 84244 - DNA, 15 bp, Homo sapiens
atgtttaaactatga

SEQ ID NO: 84245 - DNA, 15 bp, Homo sapiens
tgtttaaactatgaa

SEQ ID NO: 84246 - DNA, 15 bp, Homo sapiens
gtttaaactatgaag

SEQ ID NO: 84247 - DNA, 15 bp, Homo sapiens
tttaaactatgaaga

SEQ ID NO: 84248 - DNA, 15 bp, Homo sapiens
ttaaactatgaagaa

SEQ ID NO: 84249 - DNA, 15 bp, Homo sapiens
taaactatgaagaaa

SEQ ID NO: 84250 - DNA, 15 bp, Homo sapiens
aaactatgaagaaag

SEQ ID NO: 84251 - DNA, 15 bp, Homo sapiens
aactatgaagaaaga

SEQ ID NO: 84252 - DNA, 15 bp, Homo sapiens
actatgaagaaagag

SEQ ID NO: 84253 - DNA, 15 bp, Homo sapiens
ctatgaagaaagagt

SEQ ID NO: 84254 - DNA, 15 bp, Homo sapiens
tatgaagaaagagtt

SEQ ID NO: 84255 - DNA, 15 bp, Homo sapiens
atgaagaaagagtta

SEQ ID NO: 84256 - DNA, 15 bp, Homo sapiens
tgaagaaagagttaa

SEQ ID NO: 84257 - DNA, 15 bp, Homo sapiens
gaagaaagagttaaa

SEQ ID NO: 84258 - DNA, 15 bp, Homo sapiens
aagaaagagttaaaa

SEQ ID NO: 84259 - DNA, 15 bp, Homo sapiens
agaaagagttaaaac

SEQ ID NO: 84260 - DNA, 15 bp, Homo sapiens
gaaagagttaaaaca

SEQ ID NO: 84261 - DNA, 15 bp, Homo sapiens
aaagagttaaaacat

SEQ ID NO: 84262 - DNA, 15 bp, Homo sapiens
aagagttaaaacatc

SEQ ID NO: 84263 - DNA, 15 bp, Homo sapiens
agagttaaaacatcc

SEQ ID NO: 84264 - DNA, 15 bp, Homo sapiens
gagttaaaacatcct

SEQ ID NO: 84265 - DNA, 15 bp, Homo sapiens
agttaaaacatcctg

SEQ ID NO: 84266 - DNA, 15 bp, Homo sapiens
gttaaaacatcctga

SEQ ID NO: 84267 - DNA, 15 bp, Homo sapiens
ttaaaacatcctgag

SEQ ID NO: 84268 - DNA, 15 bp, Homo sapiens
taaaacatcctgaga

SEQ ID NO: 84269 - DNA, 15 bp, Homo sapiens
aaaacatcctgagaa

SEQ ID NO: 84270 - DNA, 15 bp, Homo sapiens
aaacatcctgagaat

SEQ ID NO: 84271 - DNA, 15 bp, Homo sapiens
aacatcctgagaatg

SEQ ID NO: 84272 - DNA, 15 bp, Homo sapiens
acatcctgagaatgc

SEQ ID NO: 84273 - DNA, 15 bp, Homo sapiens
catcctgagaatgct

SEQ ID NO: 84274 - DNA, 15 bp, Homo sapiens
atcctgagaatgcta

SEQ ID NO: 84275 - DNA, 15 bp, Homo sapiens
tcctgagaatgctag

SEQ ID NO: 84276 - DNA, 15 bp, Homo sapiens
cctgagaatgctagt

SEQ ID NO: 84277 - DNA, 15 bp, Homo sapiens
ctgagaatgctagta

SEQ ID NO: 84278 - DNA, 15 bp, Homo sapiens
tgagaatgctagtaa

SEQ ID NO: 84279 - DNA, 15 bp, Homo sapiens
gagaatgctagtaag

SEQ ID NO: 84280 - DNA, 15 bp, Homo sapiens
agaatgctagtaagt

SEQ ID NO: 84281 - DNA, 15 bp, Homo sapiens
gaatgctagtaagta

SEQ ID NO: 84282 - DNA, 15 bp, Homo sapiens
aatgctagtaagtat

SEQ ID NO: 84283 - DNA, 15 bp, Homo sapiens
atgctagtaagtatg

SEQ ID NO: 84284 - DNA, 15 bp, Homo sapiens
tgctagtaagtatgt

SEQ ID NO: 84285 - DNA, 15 bp, Homo sapiens
gctagtaagtatgta

SEQ ID NO: 84286 - DNA, 15 bp, Homo sapiens
ctagtaagtatgtat

SEQ ID NO: 84287 - DNA, 15 bp, Homo sapiens
tagtaagtatgtatt

SEQ ID NO: 84288 - DNA, 15 bp, Homo sapiens
agtaagtatgtattt

SEQ ID NO: 84289 - DNA, 15 bp, Homo sapiens
gtaagtatgtatttt

SEQ ID NO: 84290 - DNA, 15 bp, Homo sapiens
taagtatgtattttt

SEQ ID NO: 84291 - DNA, 15 bp, Homo sapiens
aagtatgtatttttg

SEQ ID NO: 84292 - DNA, 15 bp, Homo sapiens
agtatgtatttttga

SEQ ID NO: 84293 - DNA, 15 bp, Homo sapiens
gtatgtatttttgaa

SEQ ID NO: 84294 - DNA, 15 bp, Homo sapiens
tatgtatttttgaaa

SEQ ID NO: 84295 - DNA, 15 bp, Homo sapiens
atgtatttttgaaag

SEQ ID NO: 84296 - DNA, 15 bp, Homo sapiens
tgtatttttgaaagg

SEQ ID NO: 84297 - DNA, 15 bp, Homo sapiens
gtatttttgaaagga

SEQ ID NO: 84298 - DNA, 15 bp, Homo sapiens
tatttttgaaaggac

SEQ ID NO: 84299 - DNA, 15 bp, Homo sapiens
atttttgaaaggact

SEQ ID NO: 84300 - DNA, 15 bp, Homo sapiens
tttttgaaaggactt

SEQ ID NO: 84301 - DNA, 15 bp, Homo sapiens
ttttgaaaggacttc

SEQ ID NO: 84302 - DNA, 15 bp, Homo sapiens
tttgaaaggacttcc

SEQ ID NO: 84303 - DNA, 15 bp, Homo sapiens
ttgaaaggacttcca

SEQ ID NO: 84304 - DNA, 15 bp, Homo sapiens
tgaaaggacttccaa

SEQ ID NO: 84305 - DNA, 15 bp, Homo sapiens
gaaaggacttccaaa

SEQ ID NO: 84306 - DNA, 15 bp, Homo sapiens
aaaggacttccaaaa

SEQ ID NO: 84307 - DNA, 15 bp, Homo sapiens
aaggacttccaaaat

SEQ ID NO: 84308 - DNA, 15 bp, Homo sapiens
aggacttccaaaatt

SEQ ID NO: 84309 - DNA, 15 bp, Homo sapiens
ggacttccaaaattt

SEQ ID NO: 84310 - DNA, 15 bp, Homo sapiens
gacttccaaaatttg

SEQ ID NO: 84311 - DNA, 15 bp, Homo sapiens
acttccaaaatttga

SEQ ID NO: 84312 - DNA, 15 bp, Homo sapiens
cttccaaaatttgag

SEQ ID NO: 84313 - DNA, 15 bp, Homo sapiens
ttccaaaatttgagt

SEQ ID NO: 84314 - DNA, 15 bp, Homo sapiens
tccaaaatttgagtt

SEQ ID NO: 84315 - DNA, 15 bp, Homo sapiens
ccaaaatttgagttt

SEQ ID NO: 84316 - DNA, 15 bp, Homo sapiens
caaaatttgagttta

SEQ ID NO: 84317 - DNA, 15 bp, Homo sapiens
aaaatttgagtttaa

SEQ ID NO: 84318 - DNA, 15 bp, Homo sapiens
aaatttgagtttaaa

SEQ ID NO: 84319 - DNA, 15 bp, Homo sapiens
aatttgagtttaaag

SEQ ID NO: 84320 - DNA, 15 bp, Homo sapiens
atttgagtttaaaga

SEQ ID NO: 84321 - DNA, 15 bp, Homo sapiens
tttgagtttaaagag

SEQ ID NO: 84322 - DNA, 15 bp, Homo sapiens
ttgagtttaaagagg

SEQ ID NO: 84323 - DNA, 15 bp, Homo sapiens
tgagtttaaagaggt

SEQ ID NO: 84324 - DNA, 15 bp, Homo sapiens
gagtttaaagaggta

SEQ ID NO: 84325 - DNA, 15 bp, Homo sapiens
agtttaaagaggtaa

SEQ ID NO: 84326 - DNA, 15 bp, Homo sapiens
gtttaaagaggtaaa

SEQ ID NO: 84327 - DNA, 15 bp, Homo sapiens
tttaaagaggtaaac

SEQ ID NO: 84328 - DNA, 15 bp, Homo sapiens
ttaaagaggtaaact

SEQ ID NO: 84329 - DNA, 15 bp, Homo sapiens
taaagaggtaaactc

SEQ ID NO: 84330 - DNA, 15 bp, Homo sapiens
aaagaggtaaactcc

SEQ ID NO: 84331 - DNA, 15 bp, Homo sapiens
aagaggtaaactcct

SEQ ID NO: 84332 - DNA, 15 bp, Homo sapiens
agaggtaaactcctt

SEQ ID NO: 84333 - DNA, 15 bp, Homo sapiens
gaggtaaactccttt

SEQ ID NO: 84334 - DNA, 15 bp, Homo sapiens
aggtaaactcctttt

SEQ ID NO: 84335 - DNA, 15 bp, Homo sapiens
ggtaaactcctttta

SEQ ID NO: 84336 - DNA, 15 bp, Homo sapiens
gtaaactccttttac

SEQ ID NO: 84337 - DNA, 15 bp, Homo sapiens
taaactccttttaca

SEQ ID NO: 84338 - DNA, 15 bp, Homo sapiens
aaactccttttacat

SEQ ID NO: 84339 - DNA, 15 bp, Homo sapiens
aactccttttacatg

SEQ ID NO: 84340 - DNA, 15 bp, Homo sapiens
actccttttacatga

SEQ ID NO: 84341 - DNA, 15 bp, Homo sapiens
ctccttttacatgac

SEQ ID NO: 84342 - DNA, 15 bp, Homo sapiens
tccttttacatgaca

SEQ ID NO: 84343 - DNA, 15 bp, Homo sapiens
ccttttacatgacaa

SEQ ID NO: 84344 - DNA, 15 bp, Homo sapiens
cttttacatgacaaa

SEQ ID NO: 84345 - DNA, 15 bp, Homo sapiens
ttttacatgacaaag

SEQ ID NO: 84346 - DNA, 15 bp, Homo sapiens
tttacatgacaaagt

SEQ ID NO: 84347 - DNA, 15 bp, Homo sapiens
ttacatgacaaagtt

SEQ ID NO: 84348 - DNA, 15 bp, Homo sapiens
tacatgacaaagtta

SEQ ID NO: 84349 - DNA, 15 bp, Homo sapiens
acatgacaaagttac

SEQ ID NO: 84350 - DNA, 15 bp, Homo sapiens
catgacaaagttact

SEQ ID NO: 84351 - DNA, 15 bp, Homo sapiens
atgacaaagttactt

SEQ ID NO: 84352 - DNA, 15 bp, Homo sapiens
tgacaaagttactta

SEQ ID NO: 84353 - DNA, 15 bp, Homo sapiens
gacaaagttacttag

SEQ ID NO: 84354 - DNA, 15 bp, Homo sapiens
acaaagttacttaga

SEQ ID NO: 84355 - DNA, 15 bp, Homo sapiens
caaagttacttagaa

SEQ ID NO: 84356 - DNA, 15 bp, Homo sapiens
aaagttacttagaaa

SEQ ID NO: 84357 - DNA, 15 bp, Homo sapiens
aagttacttagaaac

SEQ ID NO: 84358 - DNA, 15 bp, Homo sapiens
agttacttagaaaca

SEQ ID NO: 84359 - DNA, 15 bp, Homo sapiens
gttacttagaaacac

SEQ ID NO: 84360 - DNA, 15 bp, Homo sapiens
ttacttagaaacact

SEQ ID NO: 84361 - DNA, 15 bp, Homo sapiens
tacttagaaacacta

SEQ ID NO: 84362 - DNA, 15 bp, Homo sapiens
acttagaaacactac

SEQ ID NO: 84363 - DNA, 15 bp, Homo sapiens
cttagaaacactact

SEQ ID NO: 84364 - DNA, 15 bp, Homo sapiens
ttagaaacactactg

SEQ ID NO: 84365 - DNA, 15 bp, Homo sapiens
tagaaacactactgc

SEQ ID NO: 84366 - DNA, 15 bp, Homo sapiens
agaaacactactgct

SEQ ID NO: 84367 - DNA, 15 bp, Homo sapiens
gaaacactactgctg

SEQ ID NO: 84368 - DNA, 15 bp, Homo sapiens
aaacactactgctgt

SEQ ID NO: 84369 - DNA, 15 bp, Homo sapiens
aacactactgctgtt

SEQ ID NO: 84370 - DNA, 15 bp, Homo sapiens
acactactgctgttt

SEQ ID NO: 84371 - DNA, 15 bp, Homo sapiens
cactactgctgtttc

SEQ ID NO: 84372 - DNA, 15 bp, Homo sapiens
actactgctgtttcc

SEQ ID NO: 84373 - DNA, 15 bp, Homo sapiens
ctactgctgtttccc

SEQ ID NO: 84374 - DNA, 15 bp, Homo sapiens
tactgctgtttccct

SEQ ID NO: 84375 - DNA, 15 bp, Homo sapiens
actgctgtttccctc

SEQ ID NO: 84376 - DNA, 15 bp, Homo sapiens
ctgctgtttccctct

SEQ ID NO: 84377 - DNA, 15 bp, Homo sapiens
tgctgtttccctctc

SEQ ID NO: 84378 - DNA, 15 bp, Homo sapiens
gctgtttccctctcc

SEQ ID NO: 84379 - DNA, 15 bp, Homo sapiens
ctgtttccctctccc

SEQ ID NO: 84380 - DNA, 15 bp, Homo sapiens
tgtttccctctccct

SEQ ID NO: 84381 - DNA, 15 bp, Homo sapiens
gtttccctctccctt

SEQ ID NO: 84382 - DNA, 15 bp, Homo sapiens
tttccctctcccttg

SEQ ID NO: 84383 - DNA, 15 bp, Homo sapiens
ttccctctcccttgc

SEQ ID NO: 84384 - DNA, 15 bp, Homo sapiens
tccctctcccttgcc

SEQ ID NO: 84385 - DNA, 15 bp, Homo sapiens
ccctctcccttgcct

SEQ ID NO: 84386 - DNA, 15 bp, Homo sapiens
cctctcccttgcctt

SEQ ID NO: 84387 - DNA, 15 bp, Homo sapiens
ctctcccttgccttc

SEQ ID NO: 84388 - DNA, 15 bp, Homo sapiens
tctcccttgccttct

SEQ ID NO: 84389 - DNA, 15 bp, Homo sapiens
ctcccttgccttctc

SEQ ID NO: 84390 - DNA, 15 bp, Homo sapiens
tcccttgccttctcc

SEQ ID NO: 84391 - DNA, 15 bp, Homo sapiens
cccttgccttctccc

SEQ ID NO: 84392 - DNA, 15 bp, Homo sapiens
ccttgccttctccct

SEQ ID NO: 84393 - DNA, 15 bp, Homo sapiens
cttgccttctccctg

SEQ ID NO: 84394 - DNA, 15 bp, Homo sapiens
ttgccttctccctgt

SEQ ID NO: 84395 - DNA, 15 bp, Homo sapiens
tgccttctccctgtc

SEQ ID NO: 84396 - DNA, 15 bp, Homo sapiens
gccttctccctgtcc

SEQ ID NO: 84397 - DNA, 15 bp, Homo sapiens
ccttctccctgtccc

SEQ ID NO: 84398 - DNA, 15 bp, Homo sapiens
cttctccctgtccca

SEQ ID NO: 84399 - DNA, 15 bp, Homo sapiens
ttctccctgtcccat

SEQ ID NO: 84400 - DNA, 15 bp, Homo sapiens
tctccctgtcccatg

SEQ ID NO: 84401 - DNA, 15 bp, Homo sapiens
ctccctgtcccatgc

SEQ ID NO: 84402 - DNA, 15 bp, Homo sapiens
tccctgtcccatgca

SEQ ID NO: 84403 - DNA, 15 bp, Homo sapiens
ccctgtcccatgcat

SEQ ID NO: 84404 - DNA, 15 bp, Homo sapiens
cctgtcccatgcata

SEQ ID NO: 84405 - DNA, 15 bp, Homo sapiens
ctgtcccatgcatac

SEQ ID NO: 84406 - DNA, 15 bp, Homo sapiens
tgtcccatgcatacc

SEQ ID NO: 84407 - DNA, 15 bp, Homo sapiens
gtcccatgcataccc

SEQ ID NO: 84408 - DNA, 15 bp, Homo sapiens
tcccatgcatacccc

SEQ ID NO: 84409 - DNA, 15 bp, Homo sapiens
cccatgcataccccc

SEQ ID NO: 84410 - DNA, 15 bp, Homo sapiens
ccatgcataccccca

SEQ ID NO: 84411 - DNA, 15 bp, Homo sapiens
catgcatacccccag

SEQ ID NO: 84412 - DNA, 15 bp, Homo sapiens
atgcatacccccagc

SEQ ID NO: 84413 - DNA, 15 bp, Homo sapiens
tgcatacccccagct

SEQ ID NO: 84414 - DNA, 15 bp, Homo sapiens
gcatacccccagctg

SEQ ID NO: 84415 - DNA, 15 bp, Homo sapiens
catacccccagctgt

SEQ ID NO: 84416 - DNA, 15 bp, Homo sapiens
atacccccagctgtg

SEQ ID NO: 84417 - DNA, 15 bp, Homo sapiens
tacccccagctgtgt

SEQ ID NO: 84418 - DNA, 15 bp, Homo sapiens
acccccagctgtgtt

SEQ ID NO: 84419 - DNA, 15 bp, Homo sapiens
cccccagctgtgttc

SEQ ID NO: 84420 - DNA, 15 bp, Homo sapiens
ccccagctgtgttcc

SEQ ID NO: 84421 - DNA, 15 bp, Homo sapiens
cccagctgtgttcca

SEQ ID NO: 84422 - DNA, 15 bp, Homo sapiens
ccagctgtgttccag

SEQ ID NO: 84423 - DNA, 15 bp, Homo sapiens
cagctgtgttccaga

SEQ ID NO: 84424 - DNA, 15 bp, Homo sapiens
agctgtgttccagaa

SEQ ID NO: 84425 - DNA, 15 bp, Homo sapiens
gctgtgttccagaat

SEQ ID NO: 84426 - DNA, 15 bp, Homo sapiens
ctgtgttccagaatg

SEQ ID NO: 84427 - DNA, 15 bp, Homo sapiens
tgtgttccagaatga

SEQ ID NO: 84428 - DNA, 15 bp, Homo sapiens
gtgttccagaatgat

SEQ ID NO: 84429 - DNA, 15 bp, Homo sapiens
tgttccagaatgatg

SEQ ID NO: 84430 - DNA, 15 bp, Homo sapiens
gttccagaatgatgg

SEQ ID NO: 84431 - DNA, 15 bp, Homo sapiens
ttccagaatgatggc

SEQ ID NO: 84432 - DNA, 15 bp, Homo sapiens
tccagaatgatggca

SEQ ID NO: 84433 - DNA, 15 bp, Homo sapiens
ccagaatgatggcac

SEQ ID NO: 84434 - DNA, 15 bp, Homo sapiens
cagaatgatggcaca

SEQ ID NO: 84435 - DNA, 15 bp, Homo sapiens
agaatgatggcacat

SEQ ID NO: 84436 - DNA, 15 bp, Homo sapiens
gaatgatggcacata

SEQ ID NO: 84437 - DNA, 15 bp, Homo sapiens
aatgatggcacataa

SEQ ID NO: 84438 - DNA, 15 bp, Homo sapiens
atgatggcacataaa

SEQ ID NO: 84439 - DNA, 15 bp, Homo sapiens
tgatggcacataaag

SEQ ID NO: 84440 - DNA, 15 bp, Homo sapiens
gatggcacataaagt

SEQ ID NO: 84441 - DNA, 15 bp, Homo sapiens
atggcacataaagta

SEQ ID NO: 84442 - DNA, 15 bp, Homo sapiens
tggcacataaagtaa

SEQ ID NO: 84443 - DNA, 15 bp, Homo sapiens
ggcacataaagtaaa

SEQ ID NO: 84444 - DNA, 15 bp, Homo sapiens
gcacataaagtaaac

SEQ ID NO: 84445 - DNA, 15 bp, Homo sapiens
cacataaagtaaaca

SEQ ID NO: 84446 - DNA, 15 bp, Homo sapiens
acataaagtaaacat

SEQ ID NO: 84447 - DNA, 15 bp, Homo sapiens
cataaagtaaacatt

SEQ ID NO: 84448 - DNA, 15 bp, Homo sapiens
ataaagtaaacattc

SEQ ID NO: 84449 - DNA, 15 bp, Homo sapiens
taaagtaaacattca

SEQ ID NO: 84450 - DNA, 15 bp, Homo sapiens
aaagtaaacattcat

SEQ ID NO: 84451 - DNA, 15 bp, Homo sapiens
aagtaaacattcata

SEQ ID NO: 84452 - DNA, 15 bp, Homo sapiens
agtaaacattcatat

SEQ ID NO: 84453 - DNA, 15 bp, Homo sapiens
gtaaacattcatatt

SEQ ID NO: 84454 - DNA, 15 bp, Homo sapiens
taaacattcatattt

SEQ ID NO: 84455 - DNA, 15 bp, Homo sapiens
aaacattcatattta

SEQ ID NO: 84456 - DNA, 15 bp, Homo sapiens
aacattcatatttat

SEQ ID NO: 84457 - DNA, 15 bp, Homo sapiens
acattcatatttatt

SEQ ID NO: 84458 - DNA, 15 bp, Homo sapiens
cattcatatttattt

SEQ ID NO: 84459 - DNA, 15 bp, Homo sapiens
attcatatttatttc

SEQ ID NO: 84460 - DNA, 15 bp, Homo sapiens
ttcatatttatttcc

SEQ ID NO: 84461 - DNA, 15 bp, Homo sapiens
tcatatttatttccc

SEQ ID NO: 84462 - DNA, 15 bp, Homo sapiens
catatttatttccct

SEQ ID NO: 84463 - DNA, 15 bp, Homo sapiens
atatttatttccctt

SEQ ID NO: 84464 - DNA, 15 bp, Homo sapiens
tatttatttcccttt

SEQ ID NO: 84465 - DNA, 15 bp, Homo sapiens
atttatttccctttt

SEQ ID NO: 84466 - DNA, 15 bp, Homo sapiens
tttatttcccttttt

SEQ ID NO: 84467 - DNA, 15 bp, Homo sapiens
ttatttccctttttt

SEQ ID NO: 84468 - DNA, 15 bp, Homo sapiens
tatttcccttttttt

SEQ ID NO: 84469 - DNA, 15 bp, Homo sapiens
atttccctttttttg

SEQ ID NO: 84470 - DNA, 15 bp, Homo sapiens
tttccctttttttgt

SEQ ID NO: 84471 - DNA, 15 bp, Homo sapiens
ttccctttttttgtt

SEQ ID NO: 84472 - DNA, 15 bp, Homo sapiens
tccctttttttgttt

SEQ ID NO: 84473 - DNA, 15 bp, Homo sapiens
ccctttttttgtttt

SEQ ID NO: 84474 - DNA, 15 bp, Homo sapiens
cctttttttgttttt

SEQ ID NO: 84475 - DNA, 15 bp, Homo sapiens
ctttttttgtttttt

SEQ ID NO: 84476 - DNA, 15 bp, Homo sapiens
tttttttgttttttt

SEQ ID NO: 84477 - DNA, 15 bp, Homo sapiens
ttttttgtttttttt

SEQ ID NO: 84478 - DNA, 15 bp, Homo sapiens
tttttgttttttttt

SEQ ID NO: 84479 - DNA, 15 bp, Homo sapiens
ttttgtttttttttt

SEQ ID NO: 84480 - DNA, 15 bp, Homo sapiens
tttgttttttttttt

SEQ ID NO: 84481 - DNA, 15 bp, Homo sapiens
ttgtttttttttttt

SEQ ID NO: 84482 - DNA, 15 bp, Homo sapiens
tttttttttttttgc

SEQ ID NO: 84483 - DNA, 15 bp, Homo sapiens
ttttttttttttgct

SEQ ID NO: 84484 - DNA, 15 bp, Homo sapiens
tttttttttttgctt

SEQ ID NO: 84485 - DNA, 15 bp, Homo sapiens
ttttttttttgcttg

SEQ ID NO: 84486 - DNA, 15 bp, Homo sapiens
tttttttttgcttgt

SEQ ID NO: 84487 - DNA, 15 bp, Homo sapiens
ttttttttgcttgtt

SEQ ID NO: 84488 - DNA, 15 bp, Homo sapiens
tttttttgcttgttt

SEQ ID NO: 84489 - DNA, 15 bp, Homo sapiens
ttttttgcttgtttg

SEQ ID NO: 84490 - DNA, 15 bp, Homo sapiens
tttttgcttgtttgt

SEQ ID NO: 84491 - DNA, 15 bp, Homo sapiens
ttttgcttgtttgtt

SEQ ID NO: 84492 - DNA, 15 bp, Homo sapiens
tttgcttgtttgttt

SEQ ID NO: 84493 - DNA, 15 bp, Homo sapiens
ttgcttgtttgtttt

SEQ ID NO: 84494 - DNA, 15 bp, Homo sapiens
tgcttgtttgttttg

SEQ ID NO: 84495 - DNA, 15 bp, Homo sapiens
gcttgtttgttttgt

SEQ ID NO: 84496 - DNA, 15 bp, Homo sapiens
cttgtttgttttgtt

SEQ ID NO: 84497 - DNA, 15 bp, Homo sapiens
gtttgttttgttttt

SEQ ID NO: 84498 - DNA, 15 bp, Homo sapiens
tttgttttgtttttt

SEQ ID NO: 84499 - DNA, 15 bp, Homo sapiens
ttgttttgttttttt

SEQ ID NO: 84500 - DNA, 15 bp, Homo sapiens
tgttttgtttttttg

SEQ ID NO: 84501 - DNA, 15 bp, Homo sapiens
gttttgtttttttgt

SEQ ID NO: 84502 - DNA, 15 bp, Homo sapiens
ttttgtttttttgtt

SEQ ID NO: 84503 - DNA, 15 bp, Homo sapiens
tttgtttttttgttt

SEQ ID NO: 84504 - DNA, 15 bp, Homo sapiens
ttgtttttttgtttg

SEQ ID NO: 84505 - DNA, 15 bp, Homo sapiens
tgtttttttgtttga

SEQ ID NO: 84506 - DNA, 15 bp, Homo sapiens
gtttttttgtttgag

SEQ ID NO: 84507 - DNA, 15 bp, Homo sapiens
tttttttgtttgaga

SEQ ID NO: 84508 - DNA, 15 bp, Homo sapiens
ttttttgtttgagac

SEQ ID NO: 84509 - DNA, 15 bp, Homo sapiens
tttttgtttgagaca

SEQ ID NO: 84510 - DNA, 15 bp, Homo sapiens
ttttgtttgagacag

SEQ ID NO: 84511 - DNA, 15 bp, Homo sapiens
tttgtttgagacagt

SEQ ID NO: 84512 - DNA, 15 bp, Homo sapiens
ttgtttgagacagtc

SEQ ID NO: 84513 - DNA, 15 bp, Homo sapiens
tgtttgagacagtct

SEQ ID NO: 84514 - DNA, 15 bp, Homo sapiens
gtttgagacagtctc

SEQ ID NO: 84515 - DNA, 15 bp, Homo sapiens
tttgagacagtctca

SEQ ID NO: 84516 - DNA, 15 bp, Homo sapiens
ttgagacagtctcac

SEQ ID NO: 84517 - DNA, 15 bp, Homo sapiens
tgagacagtctcact

SEQ ID NO: 84518 - DNA, 15 bp, Homo sapiens
gagacagtctcactc

SEQ ID NO: 84519 - DNA, 15 bp, Homo sapiens
agacagtctcactca

SEQ ID NO: 84520 - DNA, 15 bp, Homo sapiens
gacagtctcactcaa

SEQ ID NO: 84521 - DNA, 15 bp, Homo sapiens
acagtctcactcaat

SEQ ID NO: 84522 - DNA, 15 bp, Homo sapiens
cagtctcactcaatc

SEQ ID NO: 84523 - DNA, 15 bp, Homo sapiens
agtctcactcaatca

SEQ ID NO: 84524 - DNA, 15 bp, Homo sapiens
gtctcactcaatcac

SEQ ID NO: 84525 - DNA, 15 bp, Homo sapiens
tctcactcaatcacc

SEQ ID NO: 84526 - DNA, 15 bp, Homo sapiens
ctcactcaatcaccc

SEQ ID NO: 84527 - DNA, 15 bp, Homo sapiens
tcactcaatcaccca

SEQ ID NO: 84528 - DNA, 15 bp, Homo sapiens
cactcaatcacccag

SEQ ID NO: 84529 - DNA, 15 bp, Homo sapiens
actcaatcacccagg

SEQ ID NO: 84530 - DNA, 15 bp, Homo sapiens
ctcaatcacccaggc

SEQ ID NO: 84531 - DNA, 15 bp, Homo sapiens
tcaatcacccaggct

SEQ ID NO: 84532 - DNA, 15 bp, Homo sapiens
caatcacccaggctg

SEQ ID NO: 84533 - DNA, 15 bp, Homo sapiens
aatcacccaggctgg

SEQ ID NO: 84534 - DNA, 15 bp, Homo sapiens
atcacccaggctgga

SEQ ID NO: 84535 - DNA, 15 bp, Homo sapiens
ggagtgcagtggcaa

SEQ ID NO: 84536 - DNA, 15 bp, Homo sapiens
gagtgcagtggcaac

SEQ ID NO: 84537 - DNA, 15 bp, Homo sapiens
agtgcagtggcaaca

SEQ ID NO: 84538 - DNA, 15 bp, Homo sapiens
gtgcagtggcaacat

SEQ ID NO: 84539 - DNA, 15 bp, Homo sapiens
tgcagtggcaacatc

SEQ ID NO: 84540 - DNA, 15 bp, Homo sapiens
gcagtggcaacatct

SEQ ID NO: 84541 - DNA, 15 bp, Homo sapiens
cagtggcaacatctc

SEQ ID NO: 84542 - DNA, 15 bp, Homo sapiens
agtggcaacatctca

SEQ ID NO: 84543 - DNA, 15 bp, Homo sapiens
gtggcaacatctcag

SEQ ID NO: 84544 - DNA, 15 bp, Homo sapiens
tggcaacatctcagc

SEQ ID NO: 84545 - DNA, 15 bp, Homo sapiens
ggcaacatctcagct

SEQ ID NO: 84546 - DNA, 15 bp, Homo sapiens
gcaacatctcagctc

SEQ ID NO: 84547 - DNA, 15 bp, Homo sapiens
caacatctcagctca

SEQ ID NO: 84548 - DNA, 15 bp, Homo sapiens
aacatctcagctcac

SEQ ID NO: 84549 - DNA, 15 bp, Homo sapiens
acatctcagctcact

SEQ ID NO: 84550 - DNA, 15 bp, Homo sapiens
caacctctacctcct

SEQ ID NO: 84551 - DNA, 15 bp, Homo sapiens
aacctctacctcctg

SEQ ID NO: 84552 - DNA, 15 bp, Homo sapiens
acctctacctcctga

SEQ ID NO: 84553 - DNA, 15 bp, Homo sapiens
cctctacctcctgag

SEQ ID NO: 84554 - DNA, 15 bp, Homo sapiens
ctctacctcctgagt

SEQ ID NO: 84555 - DNA, 15 bp, Homo sapiens
tctacctcctgagtt

SEQ ID NO: 84556 - DNA, 15 bp, Homo sapiens
ctacctcctgagttc

SEQ ID NO: 84557 - DNA, 15 bp, Homo sapiens
tacctcctgagttca

SEQ ID NO: 84558 - DNA, 15 bp, Homo sapiens
acctcctgagttcaa

SEQ ID NO: 84559 - DNA, 15 bp, Homo sapiens
cctcctgagttcaag

SEQ ID NO: 84560 - DNA, 15 bp, Homo sapiens
ctcctgagttcaagc

SEQ ID NO: 84561 - DNA, 15 bp, Homo sapiens
tcctgagttcaagcg

SEQ ID NO: 84562 - DNA, 15 bp, Homo sapiens
cctgagttcaagcga

SEQ ID NO: 84563 - DNA, 15 bp, Homo sapiens
ctgagttcaagcgat

SEQ ID NO: 84564 - DNA, 15 bp, Homo sapiens
tgagttcaagcgatt

SEQ ID NO: 84565 - DNA, 15 bp, Homo sapiens
ctcagcctcccgagc

SEQ ID NO: 84566 - DNA, 15 bp, Homo sapiens
tcagcctcccgagca

SEQ ID NO: 84567 - DNA, 15 bp, Homo sapiens
cagcctcccgagcag

SEQ ID NO: 84568 - DNA, 15 bp, Homo sapiens
agcctcccgagcagc

SEQ ID NO: 84569 - DNA, 15 bp, Homo sapiens
gcctcccgagcagct

SEQ ID NO: 84570 - DNA, 15 bp, Homo sapiens
cctcccgagcagctg

SEQ ID NO: 84571 - DNA, 15 bp, Homo sapiens
ctcccgagcagctgg

SEQ ID NO: 84572 - DNA, 15 bp, Homo sapiens
tcccgagcagctggg

SEQ ID NO: 84573 - DNA, 15 bp, Homo sapiens
cccgagcagctggga

SEQ ID NO: 84574 - DNA, 15 bp, Homo sapiens
ccgagcagctgggat

SEQ ID NO: 84575 - DNA, 15 bp, Homo sapiens
cgagcagctgggatt

SEQ ID NO: 84576 - DNA, 15 bp, Homo sapiens
agcagctgggattac

SEQ ID NO: 84577 - DNA, 15 bp, Homo sapiens
gcagctgggattaca

SEQ ID NO: 84578 - DNA, 15 bp, Homo sapiens
cagctgggattacag

SEQ ID NO: 84579 - DNA, 15 bp, Homo sapiens
gggattacaggcgcc

SEQ ID NO: 84580 - DNA, 15 bp, Homo sapiens
ggattacaggcgcct

SEQ ID NO: 84581 - DNA, 15 bp, Homo sapiens
gattacaggcgcctg

SEQ ID NO: 84582 - DNA, 15 bp, Homo sapiens
attacaggcgcctgc

SEQ ID NO: 84583 - DNA, 15 bp, Homo sapiens
ttacaggcgcctgcc

SEQ ID NO: 84584 - DNA, 15 bp, Homo sapiens
tacaggcgcctgccc

SEQ ID NO: 84585 - DNA, 15 bp, Homo sapiens
acaggcgcctgcccc

SEQ ID NO: 84586 - DNA, 15 bp, Homo sapiens
caggcgcctgccccc

SEQ ID NO: 84587 - DNA, 15 bp, Homo sapiens
aggcgcctgccccca

SEQ ID NO: 84588 - DNA, 15 bp, Homo sapiens
ggcgcctgcccccac

SEQ ID NO: 84589 - DNA, 15 bp, Homo sapiens
gcgcctgcccccacg

SEQ ID NO: 84590 - DNA, 15 bp, Homo sapiens
cgcctgcccccacgc

SEQ ID NO: 84591 - DNA, 15 bp, Homo sapiens
gcctgcccccacgcc

SEQ ID NO: 84592 - DNA, 15 bp, Homo sapiens
cctgcccccacgcct

SEQ ID NO: 84593 - DNA, 15 bp, Homo sapiens
ctgcccccacgcctg

SEQ ID NO: 84594 - DNA, 15 bp, Homo sapiens
tgcccccacgcctgg

SEQ ID NO: 84595 - DNA, 15 bp, Homo sapiens
gcccccacgcctggc

SEQ ID NO: 84596 - DNA, 15 bp, Homo sapiens
cccccacgcctggct

SEQ ID NO: 84597 - DNA, 15 bp, Homo sapiens
ccccacgcctggcta

SEQ ID NO: 84598 - DNA, 15 bp, Homo sapiens
cccacgcctggctaa

SEQ ID NO: 84599 - DNA, 15 bp, Homo sapiens
ccacgcctggctaat

SEQ ID NO: 84600 - DNA, 15 bp, Homo sapiens
cacgcctggctaatt

SEQ ID NO: 84601 - DNA, 15 bp, Homo sapiens
acgcctggctaattt

SEQ ID NO: 84602 - DNA, 15 bp, Homo sapiens
cgcctggctaatttt

SEQ ID NO: 84603 - DNA, 15 bp, Homo sapiens
atttttagtagagat

SEQ ID NO: 84604 - DNA, 15 bp, Homo sapiens
tttttagtagagatg

SEQ ID NO: 84605 - DNA, 15 bp, Homo sapiens
agagatggggtttcg

SEQ ID NO: 84606 - DNA, 15 bp, Homo sapiens
gagatggggtttcgc

SEQ ID NO: 84607 - DNA, 15 bp, Homo sapiens
agatggggtttcgcc

SEQ ID NO: 84608 - DNA, 15 bp, Homo sapiens
gatggggtttcgcca

SEQ ID NO: 84609 - DNA, 15 bp, Homo sapiens
atggggtttcgccat

SEQ ID NO: 84610 - DNA, 15 bp, Homo sapiens
tggggtttcgccatg

SEQ ID NO: 84611 - DNA, 15 bp, Homo sapiens
ggggtttcgccatgt

SEQ ID NO: 84612 - DNA, 15 bp, Homo sapiens
gccatgttggccaga

SEQ ID NO: 84613 - DNA, 15 bp, Homo sapiens
ccatgttggccagac

SEQ ID NO: 84614 - DNA, 15 bp, Homo sapiens
catgttggccagact

SEQ ID NO: 84615 - DNA, 15 bp, Homo sapiens
atgttggccagactg

SEQ ID NO: 84616 - DNA, 15 bp, Homo sapiens
tgttggccagactgg

SEQ ID NO: 84617 - DNA, 15 bp, Homo sapiens
gttggccagactggt

SEQ ID NO: 84618 - DNA, 15 bp, Homo sapiens
ttggccagactggtc

SEQ ID NO: 84619 - DNA, 15 bp, Homo sapiens
tggccagactggtct

SEQ ID NO: 84620 - DNA, 15 bp, Homo sapiens
ggccagactggtctt

SEQ ID NO: 84621 - DNA, 15 bp, Homo sapiens
gccagactggtcttg

SEQ ID NO: 84622 - DNA, 15 bp, Homo sapiens
ccagactggtcttga

SEQ ID NO: 84623 - DNA, 15 bp, Homo sapiens
cagactggtcttgaa

SEQ ID NO: 84624 - DNA, 15 bp, Homo sapiens
agactggtcttgaac

SEQ ID NO: 84625 - DNA, 15 bp, Homo sapiens
gactggtcttgaact

SEQ ID NO: 84626 - DNA, 15 bp, Homo sapiens
actggtcttgaactc

SEQ ID NO: 84627 - DNA, 15 bp, Homo sapiens
ctggtcttgaactct

SEQ ID NO: 84628 - DNA, 15 bp, Homo sapiens
tggtcttgaactctt

SEQ ID NO: 84629 - DNA, 15 bp, Homo sapiens
ggtcttgaactcttg

SEQ ID NO: 84630 - DNA, 15 bp, Homo sapiens
gtcttgaactcttga

SEQ ID NO: 84631 - DNA, 15 bp, Homo sapiens
tcttgaactcttgac

SEQ ID NO: 84632 - DNA, 15 bp, Homo sapiens
cttgaactcttgacc

SEQ ID NO: 84633 - DNA, 15 bp, Homo sapiens
ttgaactcttgacct

SEQ ID NO: 84634 - DNA, 15 bp, Homo sapiens
tgaactcttgacctc

SEQ ID NO: 84635 - DNA, 15 bp, Homo sapiens
aactcttgacctcaa

SEQ ID NO: 84636 - DNA, 15 bp, Homo sapiens
actcttgacctcaag

SEQ ID NO: 84637 - DNA, 15 bp, Homo sapiens
ctcttgacctcaagt

SEQ ID NO: 84638 - DNA, 15 bp, Homo sapiens
tcttgacctcaagtg

SEQ ID NO: 84639 - DNA, 15 bp, Homo sapiens
cttgacctcaagtga

SEQ ID NO: 84640 - DNA, 15 bp, Homo sapiens
ttgacctcaagtgat

SEQ ID NO: 84641 - DNA, 15 bp, Homo sapiens
tcaagtgatccgccc

SEQ ID NO: 84642 - DNA, 15 bp, Homo sapiens
caagtgatccgccca

SEQ ID NO: 84643 - DNA, 15 bp, Homo sapiens
aagtgatccgcccac

SEQ ID NO: 84644 - DNA, 15 bp, Homo sapiens
agtgatccgcccacc

SEQ ID NO: 84645 - DNA, 15 bp, Homo sapiens
gtgatccgcccacct

SEQ ID NO: 84646 - DNA, 15 bp, Homo sapiens
tgatccgcccacctc

SEQ ID NO: 84647 - DNA, 15 bp, Homo sapiens
gatccgcccacctcg

SEQ ID NO: 84648 - DNA, 15 bp, Homo sapiens
atccgcccacctcgg

SEQ ID NO: 84649 - DNA, 15 bp, Homo sapiens
tccgcccacctcggc

SEQ ID NO: 84650 - DNA, 15 bp, Homo sapiens
ccgcccacctcggcc

SEQ ID NO: 84651 - DNA, 15 bp, Homo sapiens
cgcccacctcggcct

SEQ ID NO: 84652 - DNA, 15 bp, Homo sapiens
gcccacctcggcctc

SEQ ID NO: 84653 - DNA, 15 bp, Homo sapiens
ctcccaaagtgctga

SEQ ID NO: 84654 - DNA, 15 bp, Homo sapiens
tcccaaagtgctgag

SEQ ID NO: 84655 - DNA, 15 bp, Homo sapiens
cccaaagtgctgaga

SEQ ID NO: 84656 - DNA, 15 bp, Homo sapiens
ccaaagtgctgagat

SEQ ID NO: 84657 - DNA, 15 bp, Homo sapiens
caaagtgctgagatt

SEQ ID NO: 84658 - DNA, 15 bp, Homo sapiens
attacaggcatgagt

SEQ ID NO: 84659 - DNA, 15 bp, Homo sapiens
ttacaggcatgagtc

SEQ ID NO: 84660 - DNA, 15 bp, Homo sapiens
tacaggcatgagtca

SEQ ID NO: 84661 - DNA, 15 bp, Homo sapiens
acaggcatgagtcac

SEQ ID NO: 84662 - DNA, 15 bp, Homo sapiens
caggcatgagtcact

SEQ ID NO: 84663 - DNA, 15 bp, Homo sapiens
aggcatgagtcactg

SEQ ID NO: 84664 - DNA, 15 bp, Homo sapiens
ggcatgagtcactgt

SEQ ID NO: 84665 - DNA, 15 bp, Homo sapiens
gcatgagtcactgtg

SEQ ID NO: 84666 - DNA, 15 bp, Homo sapiens
catgagtcactgtgc

SEQ ID NO: 84667 - DNA, 15 bp, Homo sapiens
atgagtcactgtgcc

SEQ ID NO: 84668 - DNA, 15 bp, Homo sapiens
tgagtcactgtgcct

SEQ ID NO: 84669 - DNA, 15 bp, Homo sapiens
gagtcactgtgcctg

SEQ ID NO: 84670 - DNA, 15 bp, Homo sapiens
agtcactgtgcctgg

SEQ ID NO: 84671 - DNA, 15 bp, Homo sapiens
gtcactgtgcctggc

SEQ ID NO: 84672 - DNA, 15 bp, Homo sapiens
tcactgtgcctggcc

SEQ ID NO: 84673 - DNA, 15 bp, Homo sapiens
cactgtgcctggcct

SEQ ID NO: 84674 - DNA, 15 bp, Homo sapiens
actgtgcctggcctc

SEQ ID NO: 84675 - DNA, 15 bp, Homo sapiens
ctgtgcctggcctct

SEQ ID NO: 84676 - DNA, 15 bp, Homo sapiens
tgtgcctggcctctt

SEQ ID NO: 84677 - DNA, 15 bp, Homo sapiens
gtgcctggcctctta

SEQ ID NO: 84678 - DNA, 15 bp, Homo sapiens
tgcctggcctcttat

SEQ ID NO: 84679 - DNA, 15 bp, Homo sapiens
gcctggcctcttatt

SEQ ID NO: 84680 - DNA, 15 bp, Homo sapiens
cctggcctcttattt

SEQ ID NO: 84681 - DNA, 15 bp, Homo sapiens
ctggcctcttatttt

SEQ ID NO: 84682 - DNA, 15 bp, Homo sapiens
tggcctcttattttt

SEQ ID NO: 84683 - DNA, 15 bp, Homo sapiens
ggcctcttatttttt

SEQ ID NO: 84684 - DNA, 15 bp, Homo sapiens
gcctcttattttttc

SEQ ID NO: 84685 - DNA, 15 bp, Homo sapiens
cctcttattttttct

SEQ ID NO: 84686 - DNA, 15 bp, Homo sapiens
ctcttattttttctt

SEQ ID NO: 84687 - DNA, 15 bp, Homo sapiens
tcttattttttcttt

SEQ ID NO: 84688 - DNA, 15 bp, Homo sapiens
cttattttttctttg

SEQ ID NO: 84689 - DNA, 15 bp, Homo sapiens
ttattttttctttgg

SEQ ID NO: 84690 - DNA, 15 bp, Homo sapiens
tattttttctttggt

SEQ ID NO: 84691 - DNA, 15 bp, Homo sapiens
attttttctttggtt

SEQ ID NO: 84692 - DNA, 15 bp, Homo sapiens
ttttttctttggtta

SEQ ID NO: 84693 - DNA, 15 bp, Homo sapiens
tttttctttggttaa

SEQ ID NO: 84694 - DNA, 15 bp, Homo sapiens
ttttctttggttaaa

SEQ ID NO: 84695 - DNA, 15 bp, Homo sapiens
tttctttggttaaac

SEQ ID NO: 84696 - DNA, 15 bp, Homo sapiens
ttctttggttaaact

SEQ ID NO: 84697 - DNA, 15 bp, Homo sapiens
tctttggttaaactt

SEQ ID NO: 84698 - DNA, 15 bp, Homo sapiens
ctttggttaaacttt

SEQ ID NO: 84699 - DNA, 15 bp, Homo sapiens
tttggttaaactttt

SEQ ID NO: 84700 - DNA, 15 bp, Homo sapiens
ttggttaaactttta

SEQ ID NO: 84701 - DNA, 15 bp, Homo sapiens
tggttaaacttttag

SEQ ID NO: 84702 - DNA, 15 bp, Homo sapiens
ggttaaacttttagg

SEQ ID NO: 84703 - DNA, 15 bp, Homo sapiens
gttaaacttttaggg

SEQ ID NO: 84704 - DNA, 15 bp, Homo sapiens
ttaaacttttaggga

SEQ ID NO: 84705 - DNA, 15 bp, Homo sapiens
taaacttttagggaa

SEQ ID NO: 84706 - DNA, 15 bp, Homo sapiens
aaacttttagggaaa

SEQ ID NO: 84707 - DNA, 15 bp, Homo sapiens
aacttttagggaaaa

SEQ ID NO: 84708 - DNA, 15 bp, Homo sapiens
acttttagggaaaaa

SEQ ID NO: 84709 - DNA, 15 bp, Homo sapiens
cttttagggaaaaag

SEQ ID NO: 84710 - DNA, 15 bp, Homo sapiens
ttttagggaaaaagt

SEQ ID NO: 84711 - DNA, 15 bp, Homo sapiens
tttagggaaaaagtt

SEQ ID NO: 84712 - DNA, 15 bp, Homo sapiens
ttagggaaaaagttt

SEQ ID NO: 84713 - DNA, 15 bp, Homo sapiens
tagggaaaaagtttg

SEQ ID NO: 84714 - DNA, 15 bp, Homo sapiens
agggaaaaagtttga

SEQ ID NO: 84715 - DNA, 15 bp, Homo sapiens
gggaaaaagtttgag

SEQ ID NO: 84716 - DNA, 15 bp, Homo sapiens
ggaaaaagtttgagc

SEQ ID NO: 84717 - DNA, 15 bp, Homo sapiens
gaaaaagtttgagct

SEQ ID NO: 84718 - DNA, 15 bp, Homo sapiens
aaaaagtttgagctg

SEQ ID NO: 84719 - DNA, 15 bp, Homo sapiens
aaaagtttgagctgc

SEQ ID NO: 84720 - DNA, 15 bp, Homo sapiens
aaagtttgagctgct

SEQ ID NO: 84721 - DNA, 15 bp, Homo sapiens
aagtttgagctgctt

SEQ ID NO: 84722 - DNA, 15 bp, Homo sapiens
agtttgagctgcttt

SEQ ID NO: 84723 - DNA, 15 bp, Homo sapiens
gtttgagctgctttt

SEQ ID NO: 84724 - DNA, 15 bp, Homo sapiens
tttgagctgctttta

SEQ ID NO: 84725 - DNA, 15 bp, Homo sapiens
ttgagctgcttttaa

SEQ ID NO: 84726 - DNA, 15 bp, Homo sapiens
tgagctgcttttaat

SEQ ID NO: 84727 - DNA, 15 bp, Homo sapiens
gagctgcttttaatt

SEQ ID NO: 84728 - DNA, 15 bp, Homo sapiens
agctgcttttaattt

SEQ ID NO: 84729 - DNA, 15 bp, Homo sapiens
gctgcttttaatttt

SEQ ID NO: 84730 - DNA, 15 bp, Homo sapiens
ctgcttttaattttc

SEQ ID NO: 84731 - DNA, 15 bp, Homo sapiens
tgcttttaattttct

SEQ ID NO: 84732 - DNA, 15 bp, Homo sapiens
gcttttaattttctt

SEQ ID NO: 84733 - DNA, 15 bp, Homo sapiens
cttttaattttcttt

SEQ ID NO: 84734 - DNA, 15 bp, Homo sapiens
ttttaattttctttt

SEQ ID NO: 84735 - DNA, 15 bp, Homo sapiens
tttaattttcttttt

SEQ ID NO: 84736 - DNA, 15 bp, Homo sapiens
ttaattttctttttg

SEQ ID NO: 84737 - DNA, 15 bp, Homo sapiens
taattttctttttgt

SEQ ID NO: 84738 - DNA, 15 bp, Homo sapiens
aattttctttttgtt

SEQ ID NO: 84739 - DNA, 15 bp, Homo sapiens
attttctttttgttt

SEQ ID NO: 84740 - DNA, 15 bp, Homo sapiens
ttttctttttgtttt

SEQ ID NO: 84741 - DNA, 15 bp, Homo sapiens
tttctttttgttttt

SEQ ID NO: 84742 - DNA, 15 bp, Homo sapiens
ttctttttgttttta

SEQ ID NO: 84743 - DNA, 15 bp, Homo sapiens
tctttttgtttttaa

SEQ ID NO: 84744 - DNA, 15 bp, Homo sapiens
ctttttgtttttaaa

SEQ ID NO: 84745 - DNA, 15 bp, Homo sapiens
tttttgtttttaaat

SEQ ID NO: 84746 - DNA, 15 bp, Homo sapiens
ttttgtttttaaata

SEQ ID NO: 84747 - DNA, 15 bp, Homo sapiens
tttgtttttaaataa

SEQ ID NO: 84748 - DNA, 15 bp, Homo sapiens
ttgtttttaaataaa

SEQ ID NO: 84749 - DNA, 15 bp, Homo sapiens
tgtttttaaataaat

SEQ ID NO: 84750 - DNA, 15 bp, Homo sapiens
gtttttaaataaatt

SEQ ID NO: 84751 - DNA, 15 bp, Homo sapiens
tttttaaataaatta

SEQ ID NO: 84752 - DNA, 15 bp, Homo sapiens
ttttaaataaattat

SEQ ID NO: 84753 - DNA, 15 bp, Homo sapiens
tttaaataaattatt

SEQ ID NO: 84754 - DNA, 15 bp, Homo sapiens
ttaaataaattatta

SEQ ID NO: 84755 - DNA, 15 bp, Homo sapiens
taaataaattattaa

SEQ ID NO: 84756 - DNA, 15 bp, Homo sapiens
aaataaattattaaa

SEQ ID NO: 84757 - DNA, 15 bp, Homo sapiens
aataaattattaaag

SEQ ID NO: 84758 - DNA, 15 bp, Homo sapiens
ataaattattaaagt

SEQ ID NO: 84759 - DNA, 15 bp, Homo sapiens
taaattattaaagtt

SEQ ID NO: 84760 - DNA, 15 bp, Homo sapiens
aaattattaaagttt

SEQ ID NO: 84761 - DNA, 15 bp, Homo sapiens
aattattaaagtttc

SEQ ID NO: 84762 - DNA, 15 bp, Homo sapiens
attattaaagtttct

SEQ ID NO: 84763 - DNA, 15 bp, Homo sapiens
ttattaaagtttctc

SEQ ID NO: 84764 - DNA, 15 bp, Homo sapiens
tattaaagtttctct

SEQ ID NO: 84765 - DNA, 15 bp, Homo sapiens
attaaagtttctcta

SEQ ID NO: 84766 - DNA, 15 bp, Homo sapiens
ttaaagtttctctat

SEQ ID NO: 84767 - DNA, 15 bp, Homo sapiens
taaagtttctctatg

SEQ ID NO: 84768 - DNA, 15 bp, Homo sapiens
aaagtttctctatgt

SEQ ID NO: 84769 - DNA, 15 bp, Homo sapiens
aagtttctctatgtt

SEQ ID NO: 84770 - DNA, 15 bp, Homo sapiens
agtttctctatgtta

SEQ ID NO: 84771 - DNA, 15 bp, Homo sapiens
gtttctctatgttag

SEQ ID NO: 84772 - DNA, 15 bp, Homo sapiens
tttctctatgttagg

SEQ ID NO: 84773 - DNA, 15 bp, Homo sapiens
ttctctatgttagga

SEQ ID NO: 84774 - DNA, 15 bp, Homo sapiens
tctctatgttaggaa

SEQ ID NO: 84775 - DNA, 15 bp, Homo sapiens
ctctatgttaggaac

SEQ ID NO: 84776 - DNA, 15 bp, Homo sapiens
tctatgttaggaact

SEQ ID NO: 84777 - DNA, 15 bp, Homo sapiens
ctatgttaggaactc

SEQ ID NO: 84778 - DNA, 15 bp, Homo sapiens
tatgttaggaactct

SEQ ID NO: 84779 - DNA, 15 bp, Homo sapiens
atgttaggaactctt

SEQ ID NO: 84780 - DNA, 15 bp, Homo sapiens
tgttaggaactcttg

SEQ ID NO: 84781 - DNA, 15 bp, Homo sapiens
gttaggaactcttgt

SEQ ID NO: 84782 - DNA, 15 bp, Homo sapiens
ttaggaactcttgtg

SEQ ID NO: 84783 - DNA, 15 bp, Homo sapiens
taggaactcttgtgt

SEQ ID NO: 84784 - DNA, 15 bp, Homo sapiens
aggaactcttgtgta

SEQ ID NO: 84785 - DNA, 15 bp, Homo sapiens
ggaactcttgtgtac

SEQ ID NO: 84786 - DNA, 15 bp, Homo sapiens
gaactcttgtgtaca

SEQ ID NO: 84787 - DNA, 15 bp, Homo sapiens
aactcttgtgtacat

SEQ ID NO: 84788 - DNA, 15 bp, Homo sapiens
actcttgtgtacatg

SEQ ID NO: 84789 - DNA, 15 bp, Homo sapiens
ctcttgtgtacatga

SEQ ID NO: 84790 - DNA, 15 bp, Homo sapiens
tcttgtgtacatgag

SEQ ID NO: 84791 - DNA, 15 bp, Homo sapiens
cttgtgtacatgagt

SEQ ID NO: 84792 - DNA, 15 bp, Homo sapiens
ttgtgtacatgagtt

SEQ ID NO: 84793 - DNA, 15 bp, Homo sapiens
tgtgtacatgagttc

SEQ ID NO: 84794 - DNA, 15 bp, Homo sapiens
gtgtacatgagttca

SEQ ID NO: 84795 - DNA, 15 bp, Homo sapiens
tgtacatgagttcat

SEQ ID NO: 84796 - DNA, 15 bp, Homo sapiens
gtacatgagttcatt

SEQ ID NO: 84797 - DNA, 15 bp, Homo sapiens
tacatgagttcattg

SEQ ID NO: 84798 - DNA, 15 bp, Homo sapiens
acatgagttcattga

SEQ ID NO: 84799 - DNA, 15 bp, Homo sapiens
catgagttcattgag

SEQ ID NO: 84800 - DNA, 15 bp, Homo sapiens
atgagttcattgagc

SEQ ID NO: 84801 - DNA, 15 bp, Homo sapiens
tgagttcattgagct

SEQ ID NO: 84802 - DNA, 15 bp, Homo sapiens
gagttcattgagctt

SEQ ID NO: 84803 - DNA, 15 bp, Homo sapiens
agttcattgagctta

SEQ ID NO: 84804 - DNA, 15 bp, Homo sapiens
gttcattgagcttat

SEQ ID NO: 84805 - DNA, 15 bp, Homo sapiens
ttcattgagcttatt

SEQ ID NO: 84806 - DNA, 15 bp, Homo sapiens
tcattgagcttattc

SEQ ID NO: 84807 - DNA, 15 bp, Homo sapiens
cattgagcttattct

SEQ ID NO: 84808 - DNA, 15 bp, Homo sapiens
attgagcttattctt

SEQ ID NO: 84809 - DNA, 15 bp, Homo sapiens
ttgagcttattctta

SEQ ID NO: 84810 - DNA, 15 bp, Homo sapiens
tgagcttattcttaa

SEQ ID NO: 84811 - DNA, 15 bp, Homo sapiens
gagcttattcttaat

SEQ ID NO: 84812 - DNA, 15 bp, Homo sapiens
agcttattcttaata

SEQ ID NO: 84813 - DNA, 15 bp, Homo sapiens
gcttattcttaataa

SEQ ID NO: 84814 - DNA, 15 bp, Homo sapiens
cttattcttaataaa

SEQ ID NO: 84815 - DNA, 15 bp, Homo sapiens
ttattcttaataaag

SEQ ID NO: 84816 - DNA, 15 bp, Homo sapiens
tattcttaataaaga

SEQ ID NO: 84817 - DNA, 15 bp, Homo sapiens
attcttaataaagac

SEQ ID NO: 84818 - DNA, 15 bp, Homo sapiens
ttcttaataaagaca

SEQ ID NO: 84819 - DNA, 15 bp, Homo sapiens
tcttaataaagacaa

SEQ ID NO: 84820 - DNA, 15 bp, Homo sapiens
cttaataaagacaaa

SEQ ID NO: 84821 - DNA, 15 bp, Homo sapiens
ttaataaagacaaat

SEQ ID NO: 84822 - DNA, 15 bp, Homo sapiens
taataaagacaaatc

SEQ ID NO: 84823 - DNA, 15 bp, Homo sapiens
aataaagacaaatct

SEQ ID NO: 84824 - DNA, 15 bp, Homo sapiens
ataaagacaaatctt

SEQ ID NO: 84825 - DNA, 15 bp, Homo sapiens
taaagacaaatcttc

SEQ ID NO: 84826 - DNA, 15 bp, Homo sapiens
aaagacaaatcttct

SEQ ID NO: 84827 - DNA, 15 bp, Homo sapiens
aagacaaatcttcta

SEQ ID NO: 84828 - DNA, 15 bp, Homo sapiens
agacaaatcttctag

SEQ ID NO: 84829 - DNA, 15 bp, Homo sapiens
gacaaatcttctaga

SEQ ID NO: 84830 - DNA, 15 bp, Homo sapiens
acaaatcttctagaa

SEQ ID NO: 84831 - DNA, 15 bp, Homo sapiens
caaatcttctagaaa

SEQ ID NO: 84832 - DNA, 15 bp, Homo sapiens
aaatcttctagaaat

SEQ ID NO: 84833 - DNA, 15 bp, Homo sapiens
aatcttctagaaata

SEQ ID NO: 84834 - DNA, 15 bp, Homo sapiens
atcttctagaaataa

SEQ ID NO: 84835 - DNA, 15 bp, Homo sapiens
tcttctagaaataat

SEQ ID NO: 84836 - DNA, 15 bp, Homo sapiens
cttctagaaataata

SEQ ID NO: 84837 - DNA, 15 bp, Homo sapiens
ttctagaaataatag

SEQ ID NO: 84838 - DNA, 15 bp, Homo sapiens
tctagaaataatagt

SEQ ID NO: 84839 - DNA, 15 bp, Homo sapiens
ctagaaataatagtt

SEQ ID NO: 84840 - DNA, 15 bp, Homo sapiens
tagaaataatagttg

SEQ ID NO: 84841 - DNA, 15 bp, Homo sapiens
agaaataatagttgt

SEQ ID NO: 84842 - DNA, 15 bp, Homo sapiens
gaaataatagttgta

SEQ ID NO: 84843 - DNA, 15 bp, Homo sapiens
aaataatagttgtat

SEQ ID NO: 84844 - DNA, 15 bp, Homo sapiens
aataatagttgtatc

SEQ ID NO: 84845 - DNA, 15 bp, Homo sapiens
ataatagttgtatct

SEQ ID NO: 84846 - DNA, 15 bp, Homo sapiens
taatagttgtatctt

SEQ ID NO: 84847 - DNA, 15 bp, Homo sapiens
aatagttgtatcttt

SEQ ID NO: 84848 - DNA, 15 bp, Homo sapiens
atagttgtatcttta

SEQ ID NO: 84849 - DNA, 15 bp, Homo sapiens
tagttgtatctttaa

SEQ ID NO: 84850 - DNA, 15 bp, Homo sapiens
agttgtatctttaaa

SEQ ID NO: 84851 - DNA, 15 bp, Homo sapiens
gttgtatctttaaat

SEQ ID NO: 84852 - DNA, 15 bp, Homo sapiens
ttgtatctttaaatg

SEQ ID NO: 84853 - DNA, 15 bp, Homo sapiens
tgtatctttaaatga

SEQ ID NO: 84854 - DNA, 15 bp, Homo sapiens
gtatctttaaatgat

SEQ ID NO: 84855 - DNA, 15 bp, Homo sapiens
tatctttaaatgatc

SEQ ID NO: 84856 - DNA, 15 bp, Homo sapiens
atctttaaatgatct

SEQ ID NO: 84857 - DNA, 15 bp, Homo sapiens
tctttaaatgatctc

SEQ ID NO: 84858 - DNA, 15 bp, Homo sapiens
ctttaaatgatctca

SEQ ID NO: 84859 - DNA, 15 bp, Homo sapiens
tttaaatgatctcaa

SEQ ID NO: 84860 - DNA, 15 bp, Homo sapiens
ttaaatgatctcaag

SEQ ID NO: 84861 - DNA, 15 bp, Homo sapiens
taaatgatctcaagg

SEQ ID NO: 84862 - DNA, 15 bp, Homo sapiens
aaatgatctcaagga

SEQ ID NO: 84863 - DNA, 15 bp, Homo sapiens
aatgatctcaaggaa

SEQ ID NO: 84864 - DNA, 15 bp, Homo sapiens
atgatctcaaggaaa

SEQ ID NO: 84865 - DNA, 15 bp, Homo sapiens
tgatctcaaggaaaa

SEQ ID NO: 84866 - DNA, 15 bp, Homo sapiens
gatctcaaggaaaat

SEQ ID NO: 84867 - DNA, 15 bp, Homo sapiens
atctcaaggaaaatg

SEQ ID NO: 84868 - DNA, 15 bp, Homo sapiens
tctcaaggaaaatgt

SEQ ID NO: 84869 - DNA, 15 bp, Homo sapiens
ctcaaggaaaatgtt

SEQ ID NO: 84870 - DNA, 15 bp, Homo sapiens
tcaaggaaaatgttt

SEQ ID NO: 84871 - DNA, 15 bp, Homo sapiens
caaggaaaatgtttg

SEQ ID NO: 84872 - DNA, 15 bp, Homo sapiens
aaggaaaatgtttgg

SEQ ID NO: 84873 - DNA, 15 bp, Homo sapiens
aggaaaatgtttggt

SEQ ID NO: 84874 - DNA, 15 bp, Homo sapiens
ggaaaatgtttggtt

SEQ ID NO: 84875 - DNA, 15 bp, Homo sapiens
gaaaatgtttggttt

SEQ ID NO: 84876 - DNA, 15 bp, Homo sapiens
aaaatgtttggtttc

SEQ ID NO: 84877 - DNA, 15 bp, Homo sapiens
aaatgtttggtttct

SEQ ID NO: 84878 - DNA, 15 bp, Homo sapiens
aatgtttggtttctc

SEQ ID NO: 84879 - DNA, 15 bp, Homo sapiens
atgtttggtttctct

SEQ ID NO: 84880 - DNA, 15 bp, Homo sapiens
tgtttggtttctctg

SEQ ID NO: 84881 - DNA, 15 bp, Homo sapiens
gtttggtttctctgg

SEQ ID NO: 84882 - DNA, 15 bp, Homo sapiens
tttggtttctctggg

SEQ ID NO: 84883 - DNA, 15 bp, Homo sapiens
ttggtttctctgggg

SEQ ID NO: 84884 - DNA, 15 bp, Homo sapiens
tggtttctctgggga

SEQ ID NO: 84885 - DNA, 15 bp, Homo sapiens
ggtttctctggggaa

SEQ ID NO: 84886 - DNA, 15 bp, Homo sapiens
gtttctctggggaat

SEQ ID NO: 84887 - DNA, 15 bp, Homo sapiens
tttctctggggaatg

SEQ ID NO: 84888 - DNA, 15 bp, Homo sapiens
ttctctggggaatga

SEQ ID NO: 84889 - DNA, 15 bp, Homo sapiens
tctctggggaatgaa

SEQ ID NO: 84890 - DNA, 15 bp, Homo sapiens
ctctggggaatgaat

SEQ ID NO: 84891 - DNA, 15 bp, Homo sapiens
tctggggaatgaatt

SEQ ID NO: 84892 - DNA, 15 bp, Homo sapiens
ctggggaatgaattt

SEQ ID NO: 84893 - DNA, 15 bp, Homo sapiens
tggggaatgaatttt

SEQ ID NO: 84894 - DNA, 15 bp, Homo sapiens
ggggaatgaattttc

SEQ ID NO: 84895 - DNA, 15 bp, Homo sapiens
gggaatgaattttca

SEQ ID NO: 84896 - DNA, 15 bp, Homo sapiens
ggaatgaattttcat

SEQ ID NO: 84897 - DNA, 15 bp, Homo sapiens
gaatgaattttcatg

SEQ ID NO: 84898 - DNA, 15 bp, Homo sapiens
aatgaattttcatga

SEQ ID NO: 84899 - DNA, 15 bp, Homo sapiens
atgaattttcatgac

SEQ ID NO: 84900 - DNA, 15 bp, Homo sapiens
tgaattttcatgacc

SEQ ID NO: 84901 - DNA, 15 bp, Homo sapiens
gaattttcatgacct

SEQ ID NO: 84902 - DNA, 15 bp, Homo sapiens
aattttcatgaccta

SEQ ID NO: 84903 - DNA, 15 bp, Homo sapiens
attttcatgacctaa

SEQ ID NO: 84904 - DNA, 15 bp, Homo sapiens
ttttcatgacctaat

SEQ ID NO: 84905 - DNA, 15 bp, Homo sapiens
tttcatgacctaatc

SEQ ID NO: 84906 - DNA, 15 bp, Homo sapiens
ttcatgacctaatct

SEQ ID NO: 84907 - DNA, 15 bp, Homo sapiens
tcatgacctaatctt

SEQ ID NO: 84908 - DNA, 15 bp, Homo sapiens
catgacctaatctta

SEQ ID NO: 84909 - DNA, 15 bp, Homo sapiens
atgacctaatcttaa

SEQ ID NO: 84910 - DNA, 15 bp, Homo sapiens
tgacctaatcttaaa

SEQ ID NO: 84911 - DNA, 15 bp, Homo sapiens
gacctaatcttaaat

SEQ ID NO: 84912 - DNA, 15 bp, Homo sapiens
acctaatcttaaatc

SEQ ID NO: 84913 - DNA, 15 bp, Homo sapiens
cctaatcttaaatca

SEQ ID NO: 84914 - DNA, 15 bp, Homo sapiens
ctaatcttaaatcag

SEQ ID NO: 84915 - DNA, 15 bp, Homo sapiens
taatcttaaatcagg

SEQ ID NO: 84916 - DNA, 15 bp, Homo sapiens
aatcttaaatcaggt

SEQ ID NO: 84917 - DNA, 15 bp, Homo sapiens
atcttaaatcaggtt

SEQ ID NO: 84918 - DNA, 15 bp, Homo sapiens
tcttaaatcaggtta

SEQ ID NO: 84919 - DNA, 15 bp, Homo sapiens
cttaaatcaggttat

SEQ ID NO: 84920 - DNA, 15 bp, Homo sapiens
ttaaatcaggttatt

SEQ ID NO: 84921 - DNA, 15 bp, Homo sapiens
taaatcaggttattt

SEQ ID NO: 84922 - DNA, 15 bp, Homo sapiens
aaatcaggttatttt

SEQ ID NO: 84923 - DNA, 15 bp, Homo sapiens
aatcaggttattttt

SEQ ID NO: 84924 - DNA, 15 bp, Homo sapiens
atcaggttatttttt

SEQ ID NO: 84925 - DNA, 15 bp, Homo sapiens
tcaggttattttttc

SEQ ID NO: 84926 - DNA, 15 bp, Homo sapiens
caggttattttttct

SEQ ID NO: 84927 - DNA, 15 bp, Homo sapiens
aggttattttttcta

SEQ ID NO: 84928 - DNA, 15 bp, Homo sapiens
ggttattttttctag

SEQ ID NO: 84929 - DNA, 15 bp, Homo sapiens
gttattttttctagc

SEQ ID NO: 84930 - DNA, 15 bp, Homo sapiens
ttattttttctagcc

SEQ ID NO: 84931 - DNA, 15 bp, Homo sapiens
tattttttctagcct

SEQ ID NO: 84932 - DNA, 15 bp, Homo sapiens
attttttctagcctg

SEQ ID NO: 84933 - DNA, 15 bp, Homo sapiens
ttttttctagcctgt

SEQ ID NO: 84934 - DNA, 15 bp, Homo sapiens
tttttctagcctgtt

SEQ ID NO: 84935 - DNA, 15 bp, Homo sapiens
ttttctagcctgttt

SEQ ID NO: 84936 - DNA, 15 bp, Homo sapiens
tttctagcctgttta

SEQ ID NO: 84937 - DNA, 15 bp, Homo sapiens
ttctagcctgtttac

SEQ ID NO: 84938 - DNA, 15 bp, Homo sapiens
tctagcctgtttact

SEQ ID NO: 84939 - DNA, 15 bp, Homo sapiens
ctagcctgtttacta

SEQ ID NO: 84940 - DNA, 15 bp, Homo sapiens
tagcctgtttactaa

SEQ ID NO: 84941 - DNA, 15 bp, Homo sapiens
agcctgtttactaaa

SEQ ID NO: 84942 - DNA, 15 bp, Homo sapiens
gcctgtttactaaat

SEQ ID NO: 84943 - DNA, 15 bp, Homo sapiens
cctgtttactaaatt

SEQ ID NO: 84944 - DNA, 15 bp, Homo sapiens
ctgtttactaaattt

SEQ ID NO: 84945 - DNA, 15 bp, Homo sapiens
tgtttactaaatttc

SEQ ID NO: 84946 - DNA, 15 bp, Homo sapiens
gtttactaaatttct

SEQ ID NO: 84947 - DNA, 15 bp, Homo sapiens
tttactaaatttcta

SEQ ID NO: 84948 - DNA, 15 bp, Homo sapiens
ttactaaatttctac

SEQ ID NO: 84949 - DNA, 15 bp, Homo sapiens
tactaaatttctaca

SEQ ID NO: 84950 - DNA, 15 bp, Homo sapiens
actaaatttctacat

SEQ ID NO: 84951 - DNA, 15 bp, Homo sapiens
ctaaatttctacatg

SEQ ID NO: 84952 - DNA, 15 bp, Homo sapiens
taaatttctacatgt

SEQ ID NO: 84953 - DNA, 15 bp, Homo sapiens
aaatttctacatgtt

SEQ ID NO: 84954 - DNA, 15 bp, Homo sapiens
aatttctacatgtta

SEQ ID NO: 84955 - DNA, 15 bp, Homo sapiens
atttctacatgttat

SEQ ID NO: 84956 - DNA, 15 bp, Homo sapiens
tttctacatgttata

SEQ ID NO: 84957 - DNA, 15 bp, Homo sapiens
ttctacatgttataa

SEQ ID NO: 84958 - DNA, 15 bp, Homo sapiens
tctacatgttataac

SEQ ID NO: 84959 - DNA, 15 bp, Homo sapiens
ctacatgttataacc

SEQ ID NO: 84960 - DNA, 15 bp, Homo sapiens
tacatgttataacct

SEQ ID NO: 84961 - DNA, 15 bp, Homo sapiens
acatgttataaccta

SEQ ID NO: 84962 - DNA, 15 bp, Homo sapiens
catgttataacctaa

SEQ ID NO: 84963 - DNA, 15 bp, Homo sapiens
atgttataacctaat

SEQ ID NO: 84964 - DNA, 15 bp, Homo sapiens
tgttataacctaatg

SEQ ID NO: 84965 - DNA, 15 bp, Homo sapiens
gttataacctaatga

SEQ ID NO: 84966 - DNA, 15 bp, Homo sapiens
ttataacctaatgaa

SEQ ID NO: 84967 - DNA, 15 bp, Homo sapiens
tataacctaatgaaa

SEQ ID NO: 84968 - DNA, 15 bp, Homo sapiens
ataacctaatgaaat

SEQ ID NO: 84969 - DNA, 15 bp, Homo sapiens
taacctaatgaaatt

SEQ ID NO: 84970 - DNA, 15 bp, Homo sapiens
aacctaatgaaattt

SEQ ID NO: 84971 - DNA, 15 bp, Homo sapiens
acctaatgaaatttt

SEQ ID NO: 84972 - DNA, 15 bp, Homo sapiens
cctaatgaaattttc

SEQ ID NO: 84973 - DNA, 15 bp, Homo sapiens
ctaatgaaattttct

SEQ ID NO: 84974 - DNA, 15 bp, Homo sapiens
taatgaaattttctt

SEQ ID NO: 84975 - DNA, 15 bp, Homo sapiens
aatgaaattttctta

SEQ ID NO: 84976 - DNA, 15 bp, Homo sapiens
atgaaattttcttac

SEQ ID NO: 84977 - DNA, 15 bp, Homo sapiens
tgaaattttcttact

SEQ ID NO: 84978 - DNA, 15 bp, Homo sapiens
gaaattttcttactt

SEQ ID NO: 84979 - DNA, 15 bp, Homo sapiens
aaattttcttacttc

SEQ ID NO: 84980 - DNA, 15 bp, Homo sapiens
aattttcttacttcc

SEQ ID NO: 84981 - DNA, 15 bp, Homo sapiens
attttcttacttcct

SEQ ID NO: 84982 - DNA, 15 bp, Homo sapiens
ttttcttacttcctc

SEQ ID NO: 84983 - DNA, 15 bp, Homo sapiens
tttcttacttcctct

SEQ ID NO: 84984 - DNA, 15 bp, Homo sapiens
ttcttacttcctctt

SEQ ID NO: 84985 - DNA, 15 bp, Homo sapiens
tcttacttcctcttt

SEQ ID NO: 84986 - DNA, 15 bp, Homo sapiens
cttacttcctcttta

SEQ ID NO: 84987 - DNA, 15 bp, Homo sapiens
ttacttcctctttat

SEQ ID NO: 84988 - DNA, 15 bp, Homo sapiens
tacttcctctttatt

SEQ ID NO: 84989 - DNA, 15 bp, Homo sapiens
acttcctctttattt

SEQ ID NO: 84990 - DNA, 15 bp, Homo sapiens
cttcctctttattta

SEQ ID NO: 84991 - DNA, 15 bp, Homo sapiens
ttcctctttatttaa

SEQ ID NO: 84992 - DNA, 15 bp, Homo sapiens
tcctctttatttaaa

SEQ ID NO: 84993 - DNA, 15 bp, Homo sapiens
cctctttatttaaaa

SEQ ID NO: 84994 - DNA, 15 bp, Homo sapiens
ctctttatttaaaac

SEQ ID NO: 84995 - DNA, 15 bp, Homo sapiens
tctttatttaaaaca

SEQ ID NO: 84996 - DNA, 15 bp, Homo sapiens
ctttatttaaaacaa

SEQ ID NO: 84997 - DNA, 15 bp, Homo sapiens
tttatttaaaacaaa

SEQ ID NO: 84998 - DNA, 15 bp, Homo sapiens
ttatttaaaacaaac

SEQ ID NO: 84999 - DNA, 15 bp, Homo sapiens
tatttaaaacaaact

SEQ ID NO: 85000 - DNA, 15 bp, Homo sapiens
atttaaaacaaacta

SEQ ID NO: 85001 - DNA, 15 bp, Homo sapiens
tttaaaacaaactat

SEQ ID NO: 85002 - DNA, 15 bp, Homo sapiens
ttaaaacaaactata

SEQ ID NO: 85003 - DNA, 15 bp, Homo sapiens
taaaacaaactataa

SEQ ID NO: 85004 - DNA, 15 bp, Homo sapiens
aaaacaaactataat

SEQ ID NO: 85005 - DNA, 15 bp, Homo sapiens
aaacaaactataatt

SEQ ID NO: 85006 - DNA, 15 bp, Homo sapiens
aacaaactataatta

SEQ ID NO: 85007 - DNA, 15 bp, Homo sapiens
acaaactataattac

SEQ ID NO: 85008 - DNA, 15 bp, Homo sapiens
caaactataattact

SEQ ID NO: 85009 - DNA, 15 bp, Homo sapiens
aaactataattactg

SEQ ID NO: 85010 - DNA, 15 bp, Homo sapiens
aactataattactgt

SEQ ID NO: 85011 - DNA, 15 bp, Homo sapiens
actataattactgtc

SEQ ID NO: 85012 - DNA, 15 bp, Homo sapiens
ctataattactgtct

SEQ ID NO: 85013 - DNA, 15 bp, Homo sapiens
tataattactgtctt

SEQ ID NO: 85014 - DNA, 15 bp, Homo sapiens
ataattactgtcttt

SEQ ID NO: 85015 - DNA, 15 bp, Homo sapiens
taattactgtctttt

SEQ ID NO: 85016 - DNA, 15 bp, Homo sapiens
aattactgtcttttt

SEQ ID NO: 85017 - DNA, 15 bp, Homo sapiens
attactgtcttttta

SEQ ID NO: 85018 - DNA, 15 bp, Homo sapiens
ttactgtctttttaa

SEQ ID NO: 85019 - DNA, 15 bp, Homo sapiens
tactgtctttttaaa

SEQ ID NO: 85020 - DNA, 15 bp, Homo sapiens
actgtctttttaaaa

SEQ ID NO: 85021 - DNA, 15 bp, Homo sapiens
ctgtctttttaaaaa

SEQ ID NO: 85022 - DNA, 15 bp, Homo sapiens
tgtctttttaaaaat

SEQ ID NO: 85023 - DNA, 15 bp, Homo sapiens
gtctttttaaaaatc

SEQ ID NO: 85024 - DNA, 15 bp, Homo sapiens
tctttttaaaaatct

SEQ ID NO: 85025 - DNA, 15 bp, Homo sapiens
ctttttaaaaatctt

SEQ ID NO: 85026 - DNA, 15 bp, Homo sapiens
tttttaaaaatcttc

SEQ ID NO: 85027 - DNA, 15 bp, Homo sapiens
ttttaaaaatcttcc

SEQ ID NO: 85028 - DNA, 15 bp, Homo sapiens
tttaaaaatcttcca

SEQ ID NO: 85029 - DNA, 15 bp, Homo sapiens
ttaaaaatcttccaa

SEQ ID NO: 85030 - DNA, 15 bp, Homo sapiens
taaaaatcttccaat

SEQ ID NO: 85031 - DNA, 15 bp, Homo sapiens
aaaaatcttccaatg

SEQ ID NO: 85032 - DNA, 15 bp, Homo sapiens
aaaatcttccaatgt

SEQ ID NO: 85033 - DNA, 15 bp, Homo sapiens
aaatcttccaatgtg

SEQ ID NO: 85034 - DNA, 15 bp, Homo sapiens
aatcttccaatgtgg

SEQ ID NO: 85035 - DNA, 15 bp, Homo sapiens
atcttccaatgtggc

SEQ ID NO: 85036 - DNA, 15 bp, Homo sapiens
tcttccaatgtggcg

SEQ ID NO: 85037 - DNA, 15 bp, Homo sapiens
cttccaatgtggcgt

SEQ ID NO: 85038 - DNA, 15 bp, Homo sapiens
ttccaatgtggcgtt

SEQ ID NO: 85039 - DNA, 15 bp, Homo sapiens
tccaatgtggcgttc

SEQ ID NO: 85040 - DNA, 15 bp, Homo sapiens
ccaatgtggcgttct

SEQ ID NO: 85041 - DNA, 15 bp, Homo sapiens
caatgtggcgttctt

SEQ ID NO: 85042 - DNA, 15 bp, Homo sapiens
aatgtggcgttctta

SEQ ID NO: 85043 - DNA, 15 bp, Homo sapiens
atgtggcgttcttat

SEQ ID NO: 85044 - DNA, 15 bp, Homo sapiens
tgtggcgttcttatt

SEQ ID NO: 85045 - DNA, 15 bp, Homo sapiens
gtggcgttcttattt

SEQ ID NO: 85046 - DNA, 15 bp, Homo sapiens
tggcgttcttatttt

SEQ ID NO: 85047 - DNA, 15 bp, Homo sapiens
ggcgttcttattttt

SEQ ID NO: 85048 - DNA, 15 bp, Homo sapiens
gcgttcttatttttc

SEQ ID NO: 85049 - DNA, 15 bp, Homo sapiens
cgttcttatttttct

SEQ ID NO: 85050 - DNA, 15 bp, Homo sapiens
gttcttatttttctt

SEQ ID NO: 85051 - DNA, 15 bp, Homo sapiens
ttcttatttttctta

SEQ ID NO: 85052 - DNA, 15 bp, Homo sapiens
tcttatttttcttaa

SEQ ID NO: 85053 - DNA, 15 bp, Homo sapiens
cttatttttcttaac

SEQ ID NO: 85054 - DNA, 15 bp, Homo sapiens
ttatttttcttaaca

SEQ ID NO: 85055 - DNA, 15 bp, Homo sapiens
tatttttcttaacat

SEQ ID NO: 85056 - DNA, 15 bp, Homo sapiens
atttttcttaacatt

SEQ ID NO: 85057 - DNA, 15 bp, Homo sapiens
tttttcttaacattt

SEQ ID NO: 85058 - DNA, 15 bp, Homo sapiens
ttttcttaacatttg

SEQ ID NO: 85059 - DNA, 15 bp, Homo sapiens
tttcttaacatttga

SEQ ID NO: 85060 - DNA, 15 bp, Homo sapiens
ttcttaacatttgaa

SEQ ID NO: 85061 - DNA, 15 bp, Homo sapiens
tcttaacatttgaat

SEQ ID NO: 85062 - DNA, 15 bp, Homo sapiens
cttaacatttgaatt

SEQ ID NO: 85063 - DNA, 15 bp, Homo sapiens
ttaacatttgaattt

SEQ ID NO: 85064 - DNA, 15 bp, Homo sapiens
taacatttgaatttt

SEQ ID NO: 85065 - DNA, 15 bp, Homo sapiens
aacatttgaattttc

SEQ ID NO: 85066 - DNA, 15 bp, Homo sapiens
acatttgaattttcc

SEQ ID NO: 85067 - DNA, 15 bp, Homo sapiens
catttgaattttcct

SEQ ID NO: 85068 - DNA, 15 bp, Homo sapiens
atttgaattttcctg

SEQ ID NO: 85069 - DNA, 15 bp, Homo sapiens
tttgaattttcctgg

SEQ ID NO: 85070 - DNA, 15 bp, Homo sapiens
ttgaattttcctggg

SEQ ID NO: 85071 - DNA, 15 bp, Homo sapiens
tgaattttcctgggc

SEQ ID NO: 85072 - DNA, 15 bp, Homo sapiens
gaattttcctgggcc

SEQ ID NO: 85073 - DNA, 15 bp, Homo sapiens
aattttcctgggcca

SEQ ID NO: 85074 - DNA, 15 bp, Homo sapiens
attttcctgggccaa

SEQ ID NO: 85075 - DNA, 15 bp, Homo sapiens
ttttcctgggccaaa

SEQ ID NO: 85076 - DNA, 15 bp, Homo sapiens
tttcctgggccaaac

SEQ ID NO: 85077 - DNA, 15 bp, Homo sapiens
ttcctgggccaaacc

SEQ ID NO: 85078 - DNA, 15 bp, Homo sapiens
tcctgggccaaacca

SEQ ID NO: 85079 - DNA, 15 bp, Homo sapiens
cctgggccaaaccat

SEQ ID NO: 85080 - DNA, 15 bp, Homo sapiens
ctgggccaaaccatg

SEQ ID NO: 85081 - DNA, 15 bp, Homo sapiens
tgggccaaaccatgt

SEQ ID NO: 85082 - DNA, 15 bp, Homo sapiens
gggccaaaccatgtt

SEQ ID NO: 85083 - DNA, 15 bp, Homo sapiens
ggccaaaccatgtta

SEQ ID NO: 85084 - DNA, 15 bp, Homo sapiens
gccaaaccatgttac

SEQ ID NO: 85085 - DNA, 15 bp, Homo sapiens
ccaaaccatgttact

SEQ ID NO: 85086 - DNA, 15 bp, Homo sapiens
caaaccatgttacta

SEQ ID NO: 85087 - DNA, 15 bp, Homo sapiens
aaaccatgttactat

SEQ ID NO: 85088 - DNA, 15 bp, Homo sapiens
aaccatgttactatg

SEQ ID NO: 85089 - DNA, 15 bp, Homo sapiens
accatgttactatga

SEQ ID NO: 85090 - DNA, 15 bp, Homo sapiens
ccatgttactatgat

SEQ ID NO: 85091 - DNA, 15 bp, Homo sapiens
catgttactatgata

SEQ ID NO: 85092 - DNA, 15 bp, Homo sapiens
atgttactatgatac

SEQ ID NO: 85093 - DNA, 15 bp, Homo sapiens
tgttactatgataca

SEQ ID NO: 85094 - DNA, 15 bp, Homo sapiens
gttactatgatacac

SEQ ID NO: 85095 - DNA, 15 bp, Homo sapiens
ttactatgatacaca

SEQ ID NO: 85096 - DNA, 15 bp, Homo sapiens
tactatgatacacat

SEQ ID NO: 85097 - DNA, 15 bp, Homo sapiens
actatgatacacatt

SEQ ID NO: 85098 - DNA, 15 bp, Homo sapiens
ctatgatacacatta

SEQ ID NO: 85099 - DNA, 15 bp, Homo sapiens
tatgatacacattat

SEQ ID NO: 85100 - DNA, 15 bp, Homo sapiens
atgatacacattatt

SEQ ID NO: 85101 - DNA, 15 bp, Homo sapiens
tgatacacattattt

SEQ ID NO: 85102 - DNA, 15 bp, Homo sapiens
gatacacattattta

SEQ ID NO: 85103 - DNA, 15 bp, Homo sapiens
atacacattatttaa

SEQ ID NO: 85104 - DNA, 15 bp, Homo sapiens
tacacattatttaag

SEQ ID NO: 85105 - DNA, 15 bp, Homo sapiens
acacattatttaagg

SEQ ID NO: 85106 - DNA, 15 bp, Homo sapiens
cacattatttaaggc

SEQ ID NO: 85107 - DNA, 15 bp, Homo sapiens
acattatttaaggct

SEQ ID NO: 85108 - DNA, 15 bp, Homo sapiens
cattatttaaggctg

SEQ ID NO: 85109 - DNA, 15 bp, Homo sapiens
attatttaaggctgt

SEQ ID NO: 85110 - DNA, 15 bp, Homo sapiens
ttatttaaggctgtt

SEQ ID NO: 85111 - DNA, 15 bp, Homo sapiens
tatttaaggctgtta

SEQ ID NO: 85112 - DNA, 15 bp, Homo sapiens
atttaaggctgttat

SEQ ID NO: 85113 - DNA, 15 bp, Homo sapiens
tttaaggctgttata

SEQ ID NO: 85114 - DNA, 15 bp, Homo sapiens
ttaaggctgttatat

SEQ ID NO: 85115 - DNA, 15 bp, Homo sapiens
taaggctgttatata

SEQ ID NO: 85116 - DNA, 15 bp, Homo sapiens
aaggctgttatataa

SEQ ID NO: 85117 - DNA, 15 bp, Homo sapiens
aggctgttatataat

SEQ ID NO: 85118 - DNA, 15 bp, Homo sapiens
ggctgttatataata

SEQ ID NO: 85119 - DNA, 15 bp, Homo sapiens
gcattttaaggtacc

SEQ ID NO: 85120 - DNA, 15 bp, Homo sapiens
cattttaaggtacca

SEQ ID NO: 85121 - DNA, 15 bp, Homo sapiens
attttaaggtaccag

SEQ ID NO: 85122 - DNA, 15 bp, Homo sapiens
ttttaaggtaccagg

SEQ ID NO: 85123 - DNA, 15 bp, Homo sapiens
tttaaggtaccaggt

SEQ ID NO: 85124 - DNA, 15 bp, Homo sapiens
ttaaggtaccaggta

SEQ ID NO: 85125 - DNA, 15 bp, Homo sapiens
taaggtaccaggtac

SEQ ID NO: 85126 - DNA, 15 bp, Homo sapiens
aaggtaccaggtacc

SEQ ID NO: 85127 - DNA, 15 bp, Homo sapiens
aggtaccaggtacca

SEQ ID NO: 85128 - DNA, 15 bp, Homo sapiens
ggtaccaggtaccag

SEQ ID NO: 85129 - DNA, 15 bp, Homo sapiens
gtaccaggtaccaga

SEQ ID NO: 85130 - DNA, 15 bp, Homo sapiens
taccaggtaccagat

SEQ ID NO: 85131 - DNA, 15 bp, Homo sapiens
accaggtaccagata

SEQ ID NO: 85132 - DNA, 15 bp, Homo sapiens
ccaggtaccagataa

SEQ ID NO: 85133 - DNA, 15 bp, Homo sapiens
caggtaccagataag

SEQ ID NO: 85134 - DNA, 15 bp, Homo sapiens
aggtaccagataaga

SEQ ID NO: 85135 - DNA, 15 bp, Homo sapiens
ggtaccagataagat

SEQ ID NO: 85136 - DNA, 15 bp, Homo sapiens
gtaccagataagatg

SEQ ID NO: 85137 - DNA, 15 bp, Homo sapiens
taccagataagatgt

SEQ ID NO: 85138 - DNA, 15 bp, Homo sapiens
accagataagatgtc

SEQ ID NO: 85139 - DNA, 15 bp, Homo sapiens
ccagataagatgtca

SEQ ID NO: 85140 - DNA, 15 bp, Homo sapiens
cagataagatgtcac

SEQ ID NO: 85141 - DNA, 15 bp, Homo sapiens
agataagatgtcaca

SEQ ID NO: 85142 - DNA, 15 bp, Homo sapiens
gataagatgtcacaa

SEQ ID NO: 85143 - DNA, 15 bp, Homo sapiens
ataagatgtcacaag

SEQ ID NO: 85144 - DNA, 15 bp, Homo sapiens
taagatgtcacaagg

SEQ ID NO: 85145 - DNA, 15 bp, Homo sapiens
aagatgtcacaaggc

SEQ ID NO: 85146 - DNA, 15 bp, Homo sapiens
agatgtcacaaggct

SEQ ID NO: 85147 - DNA, 15 bp, Homo sapiens
gatgtcacaaggctg

SEQ ID NO: 85148 - DNA, 15 bp, Homo sapiens
atgtcacaaggctgt

SEQ ID NO: 85149 - DNA, 15 bp, Homo sapiens
tgtcacaaggctgta

SEQ ID NO: 85150 - DNA, 15 bp, Homo sapiens
gtcacaaggctgtat

SEQ ID NO: 85151 - DNA, 15 bp, Homo sapiens
tcacaaggctgtata

SEQ ID NO: 85152 - DNA, 15 bp, Homo sapiens
cacaaggctgtatat

SEQ ID NO: 85153 - DNA, 15 bp, Homo sapiens
acaaggctgtatatc

SEQ ID NO: 85154 - DNA, 15 bp, Homo sapiens
caaggctgtatatca

SEQ ID NO: 85155 - DNA, 15 bp, Homo sapiens
aaggctgtatatcat

SEQ ID NO: 85156 - DNA, 15 bp, Homo sapiens
aggctgtatatcatt

SEQ ID NO: 85157 - DNA, 15 bp, Homo sapiens
ggctgtatatcatta

SEQ ID NO: 85158 - DNA, 15 bp, Homo sapiens
gctgtatatcattaa

SEQ ID NO: 85159 - DNA, 15 bp, Homo sapiens
ctgtatatcattaat

SEQ ID NO: 85160 - DNA, 15 bp, Homo sapiens
tgtatatcattaatt

SEQ ID NO: 85161 - DNA, 15 bp, Homo sapiens
gtatatcattaattg

SEQ ID NO: 85162 - DNA, 15 bp, Homo sapiens
tatatcattaattgc

SEQ ID NO: 85163 - DNA, 15 bp, Homo sapiens
atatcattaattgcc

SEQ ID NO: 85164 - DNA, 15 bp, Homo sapiens
tatcattaattgcca

SEQ ID NO: 85165 - DNA, 15 bp, Homo sapiens
atcattaattgccaa

SEQ ID NO: 85166 - DNA, 15 bp, Homo sapiens
tcattaattgccaaa

SEQ ID NO: 85167 - DNA, 15 bp, Homo sapiens
cattaattgccaaat

SEQ ID NO: 85168 - DNA, 15 bp, Homo sapiens
attaattgccaaatg

SEQ ID NO: 85169 - DNA, 15 bp, Homo sapiens
ttaattgccaaatga

SEQ ID NO: 85170 - DNA, 15 bp, Homo sapiens
taattgccaaatgat

SEQ ID NO: 85171 - DNA, 15 bp, Homo sapiens
aattgccaaatgatt

SEQ ID NO: 85172 - DNA, 15 bp, Homo sapiens
attgccaaatgattt

SEQ ID NO: 85173 - DNA, 15 bp, Homo sapiens
ttgccaaatgattta

SEQ ID NO: 85174 - DNA, 15 bp, Homo sapiens
tgccaaatgatttat

SEQ ID NO: 85175 - DNA, 15 bp, Homo sapiens
gccaaatgatttata

SEQ ID NO: 85176 - DNA, 15 bp, Homo sapiens
ccaaatgatttatac

SEQ ID NO: 85177 - DNA, 15 bp, Homo sapiens
caaatgatttataca

SEQ ID NO: 85178 - DNA, 15 bp, Homo sapiens
aaatgatttatacag

SEQ ID NO: 85179 - DNA, 15 bp, Homo sapiens
aatgatttatacagg

SEQ ID NO: 85180 - DNA, 15 bp, Homo sapiens
atgatttatacaggc

SEQ ID NO: 85181 - DNA, 15 bp, Homo sapiens
tgatttatacaggcc

SEQ ID NO: 85182 - DNA, 15 bp, Homo sapiens
gatttatacaggcca

SEQ ID NO: 85183 - DNA, 15 bp, Homo sapiens
atttatacaggccag

SEQ ID NO: 85184 - DNA, 15 bp, Homo sapiens
tttatacaggccaga

SEQ ID NO: 85185 - DNA, 15 bp, Homo sapiens
ttatacaggccagat

SEQ ID NO: 85186 - DNA, 15 bp, Homo sapiens
tatacaggccagatt

SEQ ID NO: 85187 - DNA, 15 bp, Homo sapiens
atacaggccagattt

SEQ ID NO: 85188 - DNA, 15 bp, Homo sapiens
tacaggccagatttc

SEQ ID NO: 85189 - DNA, 15 bp, Homo sapiens
acaggccagatttct

SEQ ID NO: 85190 - DNA, 15 bp, Homo sapiens
caggccagatttctt

SEQ ID NO: 85191 - DNA, 15 bp, Homo sapiens
aggccagatttcttt

SEQ ID NO: 85192 - DNA, 15 bp, Homo sapiens
ggccagatttctttg

SEQ ID NO: 85193 - DNA, 15 bp, Homo sapiens
gccagatttctttgt

SEQ ID NO: 85194 - DNA, 15 bp, Homo sapiens
ccagatttctttgtt

SEQ ID NO: 85195 - DNA, 15 bp, Homo sapiens
cagatttctttgttg

SEQ ID NO: 85196 - DNA, 15 bp, Homo sapiens
agatttctttgttgg

SEQ ID NO: 85197 - DNA, 15 bp, Homo sapiens
gatttctttgttggt

SEQ ID NO: 85198 - DNA, 15 bp, Homo sapiens
atttctttgttggtc

SEQ ID NO: 85199 - DNA, 15 bp, Homo sapiens
tttctttgttggtca

SEQ ID NO: 85200 - DNA, 15 bp, Homo sapiens
ttctttgttggtcaa

SEQ ID NO: 85201 - DNA, 15 bp, Homo sapiens
tctttgttggtcaat

SEQ ID NO: 85202 - DNA, 15 bp, Homo sapiens
ctttgttggtcaata

SEQ ID NO: 85203 - DNA, 15 bp, Homo sapiens
tttgttggtcaatag

SEQ ID NO: 85204 - DNA, 15 bp, Homo sapiens
ttgttggtcaataga

SEQ ID NO: 85205 - DNA, 15 bp, Homo sapiens
tgttggtcaatagag

SEQ ID NO: 85206 - DNA, 15 bp, Homo sapiens
gttggtcaatagagg

SEQ ID NO: 85207 - DNA, 15 bp, Homo sapiens
tggtcaatagaggtt

SEQ ID NO: 85208 - DNA, 15 bp, Homo sapiens
ggtcaatagaggttt

SEQ ID NO: 85209 - DNA, 15 bp, Homo sapiens
gtcaatagaggttta

SEQ ID NO: 85210 - DNA, 15 bp, Homo sapiens
tcaatagaggtttaa

SEQ ID NO: 85211 - DNA, 15 bp, Homo sapiens
caatagaggtttaaa

SEQ ID NO: 85212 - DNA, 15 bp, Homo sapiens
aatagaggtttaaag

SEQ ID NO: 85213 - DNA, 15 bp, Homo sapiens
atagaggtttaaagt

SEQ ID NO: 85214 - DNA, 15 bp, Homo sapiens
tagaggtttaaagtg

SEQ ID NO: 85215 - DNA, 15 bp, Homo sapiens
agaggtttaaagtga

SEQ ID NO: 85216 - DNA, 15 bp, Homo sapiens
gaggtttaaagtgat

SEQ ID NO: 85217 - DNA, 15 bp, Homo sapiens
aggtttaaagtgatg

SEQ ID NO: 85218 - DNA, 15 bp, Homo sapiens
ggtttaaagtgatga

SEQ ID NO: 85219 - DNA, 15 bp, Homo sapiens
gtttaaagtgatgaa

SEQ ID NO: 85220 - DNA, 15 bp, Homo sapiens
tttaaagtgatgaac

SEQ ID NO: 85221 - DNA, 15 bp, Homo sapiens
ttaaagtgatgaact

SEQ ID NO: 85222 - DNA, 15 bp, Homo sapiens
taaagtgatgaactt

SEQ ID NO: 85223 - DNA, 15 bp, Homo sapiens
aaagtgatgaacttc

SEQ ID NO: 85224 - DNA, 15 bp, Homo sapiens
aagtgatgaacttct

SEQ ID NO: 85225 - DNA, 15 bp, Homo sapiens
agtgatgaacttctg

SEQ ID NO: 85226 - DNA, 15 bp, Homo sapiens
gtgatgaacttctgt

SEQ ID NO: 85227 - DNA, 15 bp, Homo sapiens
tgatgaacttctgtt

SEQ ID NO: 85228 - DNA, 15 bp, Homo sapiens
gatgaacttctgttg

SEQ ID NO: 85229 - DNA, 15 bp, Homo sapiens
atgaacttctgttgt

SEQ ID NO: 85230 - DNA, 15 bp, Homo sapiens
tgaacttctgttgtg

SEQ ID NO: 85231 - DNA, 15 bp, Homo sapiens
gaacttctgttgtgt

SEQ ID NO: 85232 - DNA, 15 bp, Homo sapiens
aacttctgttgtgtt

SEQ ID NO: 85233 - DNA, 15 bp, Homo sapiens
acttctgttgtgttt

SEQ ID NO: 85234 - DNA, 15 bp, Homo sapiens
cttctgttgtgtttt

SEQ ID NO: 85235 - DNA, 15 bp, Homo sapiens
ttctgttgtgttttt

SEQ ID NO: 85236 - DNA, 15 bp, Homo sapiens
tctgttgtgtttttt

SEQ ID NO: 85237 - DNA, 15 bp, Homo sapiens
ctgttgtgttttttt

SEQ ID NO: 85238 - DNA, 15 bp, Homo sapiens
tgttgtgttttttta

SEQ ID NO: 85239 - DNA, 15 bp, Homo sapiens
gttgtgtttttttat

SEQ ID NO: 85240 - DNA, 15 bp, Homo sapiens
ttgtgtttttttatt

SEQ ID NO: 85241 - DNA, 15 bp, Homo sapiens
tgtgtttttttatta

SEQ ID NO: 85242 - DNA, 15 bp, Homo sapiens
gtgtttttttattaa

SEQ ID NO: 85243 - DNA, 15 bp, Homo sapiens
tgtttttttattaag

SEQ ID NO: 85244 - DNA, 15 bp, Homo sapiens
gtttttttattaaga

SEQ ID NO: 85245 - DNA, 15 bp, Homo sapiens
tttttttattaagaa

SEQ ID NO: 85246 - DNA, 15 bp, Homo sapiens
ttttttattaagaag

SEQ ID NO: 85247 - DNA, 15 bp, Homo sapiens
tttttattaagaagg

SEQ ID NO: 85248 - DNA, 15 bp, Homo sapiens
ttttattaagaaggt

SEQ ID NO: 85249 - DNA, 15 bp, Homo sapiens
tttattaagaaggta

SEQ ID NO: 85250 - DNA, 15 bp, Homo sapiens
ttattaagaaggtat

SEQ ID NO: 85251 - DNA, 15 bp, Homo sapiens
tattaagaaggtatt

SEQ ID NO: 85252 - DNA, 15 bp, Homo sapiens
attaagaaggtatta

SEQ ID NO: 85253 - DNA, 15 bp, Homo sapiens
ttaagaaggtattat

SEQ ID NO: 85254 - DNA, 15 bp, Homo sapiens
taagaaggtattatc

SEQ ID NO: 85255 - DNA, 15 bp, Homo sapiens
aagaaggtattatct

SEQ ID NO: 85256 - DNA, 15 bp, Homo sapiens
agaaggtattatctt

SEQ ID NO: 85257 - DNA, 15 bp, Homo sapiens
gaaggtattatctta

SEQ ID NO: 85258 - DNA, 15 bp, Homo sapiens
aaggtattatcttat

SEQ ID NO: 85259 - DNA, 15 bp, Homo sapiens
aggtattatcttatt

SEQ ID NO: 85260 - DNA, 15 bp, Homo sapiens
ggtattatcttatta

SEQ ID NO: 85261 - DNA, 15 bp, Homo sapiens
gtattatcttattag

SEQ ID NO: 85262 - DNA, 15 bp, Homo sapiens
tattatcttattagt

SEQ ID NO: 85263 - DNA, 15 bp, Homo sapiens
attatcttattagta

SEQ ID NO: 85264 - DNA, 15 bp, Homo sapiens
ttatcttattagtaa

SEQ ID NO: 85265 - DNA, 15 bp, Homo sapiens
tatcttattagtaag

SEQ ID NO: 85266 - DNA, 15 bp, Homo sapiens
atcttattagtaaga

SEQ ID NO: 85267 - DNA, 15 bp, Homo sapiens
tcttattagtaagaa

SEQ ID NO: 85268 - DNA, 15 bp, Homo sapiens
cttattagtaagaag

SEQ ID NO: 85269 - DNA, 15 bp, Homo sapiens
ttattagtaagaagt

SEQ ID NO: 85270 - DNA, 15 bp, Homo sapiens
tattagtaagaagtg

SEQ ID NO: 85271 - DNA, 15 bp, Homo sapiens
attagtaagaagtga

SEQ ID NO: 85272 - DNA, 15 bp, Homo sapiens
ttagtaagaagtgat

SEQ ID NO: 85273 - DNA, 15 bp, Homo sapiens
tagtaagaagtgatt

SEQ ID NO: 85274 - DNA, 15 bp, Homo sapiens
agtaagaagtgattt

SEQ ID NO: 85275 - DNA, 15 bp, Homo sapiens
gtaagaagtgatttt

SEQ ID NO: 85276 - DNA, 15 bp, Homo sapiens
taagaagtgattttt

SEQ ID NO: 85277 - DNA, 15 bp, Homo sapiens
aagaagtgatttttt

SEQ ID NO: 85278 - DNA, 15 bp, Homo sapiens
agaagtgattttttt

SEQ ID NO: 85279 - DNA, 15 bp, Homo sapiens
gaagtgatttttttt

SEQ ID NO: 85280 - DNA, 15 bp, Homo sapiens
aagtgatttttttta

SEQ ID NO: 85281 - DNA, 15 bp, Homo sapiens
agtgattttttttaa

SEQ ID NO: 85282 - DNA, 15 bp, Homo sapiens
gtgattttttttaag

SEQ ID NO: 85283 - DNA, 15 bp, Homo sapiens
attttttttaagaac

SEQ ID NO: 85284 - DNA, 15 bp, Homo sapiens
ttttttttaagaaca

SEQ ID NO: 85285 - DNA, 15 bp, Homo sapiens
tttttttaagaacaa

SEQ ID NO: 85286 - DNA, 15 bp, Homo sapiens
ttttttaagaacaag

SEQ ID NO: 85287 - DNA, 15 bp, Homo sapiens
tttttaagaacaagc

SEQ ID NO: 85288 - DNA, 15 bp, Homo sapiens
ttttaagaacaagca

SEQ ID NO: 85289 - DNA, 15 bp, Homo sapiens
tttaagaacaagcat

SEQ ID NO: 85290 - DNA, 15 bp, Homo sapiens
ttaagaacaagcatt

SEQ ID NO: 85291 - DNA, 15 bp, Homo sapiens
taagaacaagcattt

SEQ ID NO: 85292 - DNA, 15 bp, Homo sapiens
aagaacaagcatttt

SEQ ID NO: 85293 - DNA, 15 bp, Homo sapiens
agaacaagcatttta

SEQ ID NO: 85294 - DNA, 15 bp, Homo sapiens
gaacaagcattttat

SEQ ID NO: 85295 - DNA, 15 bp, Homo sapiens
aacaagcattttata

SEQ ID NO: 85296 - DNA, 15 bp, Homo sapiens
acaagcattttataa

SEQ ID NO: 85297 - DNA, 15 bp, Homo sapiens
caagcattttataac

SEQ ID NO: 85298 - DNA, 15 bp, Homo sapiens
aagcattttataaca

SEQ ID NO: 85299 - DNA, 15 bp, Homo sapiens
agcattttataacat

SEQ ID NO: 85300 - DNA, 15 bp, Homo sapiens
gcattttataacatc

SEQ ID NO: 85301 - DNA, 15 bp, Homo sapiens
cattttataacatca

SEQ ID NO: 85302 - DNA, 15 bp, Homo sapiens
attttataacatcaa

SEQ ID NO: 85303 - DNA, 15 bp, Homo sapiens
ttttataacatcaaa

SEQ ID NO: 85304 - DNA, 15 bp, Homo sapiens
tttataacatcaaaa

SEQ ID NO: 85305 - DNA, 15 bp, Homo sapiens
ttataacatcaaaag

SEQ ID NO: 85306 - DNA, 15 bp, Homo sapiens
tataacatcaaaaga

SEQ ID NO: 85307 - DNA, 15 bp, Homo sapiens
ataacatcaaaagaa

SEQ ID NO: 85308 - DNA, 15 bp, Homo sapiens
taacatcaaaagaaa

SEQ ID NO: 85309 - DNA, 15 bp, Homo sapiens
aacatcaaaagaaat

SEQ ID NO: 85310 - DNA, 15 bp, Homo sapiens
acatcaaaagaaatc

SEQ ID NO: 85311 - DNA, 15 bp, Homo sapiens
catcaaaagaaatca

SEQ ID NO: 85312 - DNA, 15 bp, Homo sapiens
atcaaaagaaatcag

SEQ ID NO: 85313 - DNA, 15 bp, Homo sapiens
tcaaaagaaatcagt

SEQ ID NO: 85314 - DNA, 15 bp, Homo sapiens
caaaagaaatcagta

SEQ ID NO: 85315 - DNA, 15 bp, Homo sapiens
aaaagaaatcagtag

SEQ ID NO: 85316 - DNA, 15 bp, Homo sapiens
aaagaaatcagtagt

SEQ ID NO: 85317 - DNA, 15 bp, Homo sapiens
aagaaatcagtagta

SEQ ID NO: 85318 - DNA, 15 bp, Homo sapiens
agaaatcagtagtac

SEQ ID NO: 85319 - DNA, 15 bp, Homo sapiens
gaaatcagtagtact

SEQ ID NO: 85320 - DNA, 15 bp, Homo sapiens
aaatcagtagtactc

SEQ ID NO: 85321 - DNA, 15 bp, Homo sapiens
aatcagtagtactct

SEQ ID NO: 85322 - DNA, 15 bp, Homo sapiens
atcagtagtactctt

SEQ ID NO: 85323 - DNA, 15 bp, Homo sapiens
tcagtagtactcttt

SEQ ID NO: 85324 - DNA, 15 bp, Homo sapiens
cagtagtactctttc

SEQ ID NO: 85325 - DNA, 15 bp, Homo sapiens
agtagtactctttcc

SEQ ID NO: 85326 - DNA, 15 bp, Homo sapiens
gtagtactctttcct

SEQ ID NO: 85327 - DNA, 15 bp, Homo sapiens
tagtactctttccta

SEQ ID NO: 85328 - DNA, 15 bp, Homo sapiens
agtactctttcctac

SEQ ID NO: 85329 - DNA, 15 bp, Homo sapiens
gtactctttcctacc

SEQ ID NO: 85330 - DNA, 15 bp, Homo sapiens
tactctttcctaccc

SEQ ID NO: 85331 - DNA, 15 bp, Homo sapiens
actctttcctacccc

SEQ ID NO: 85332 - DNA, 15 bp, Homo sapiens
ctctttcctaccccc

SEQ ID NO: 85333 - DNA, 15 bp, Homo sapiens
tctttcctaccccct

SEQ ID NO: 85334 - DNA, 15 bp, Homo sapiens
ctttcctaccccctc

SEQ ID NO: 85335 - DNA, 15 bp, Homo sapiens
tttcctaccccctca

SEQ ID NO: 85336 - DNA, 15 bp, Homo sapiens
ttcctaccccctcat

SEQ ID NO: 85337 - DNA, 15 bp, Homo sapiens
tcctaccccctcata

SEQ ID NO: 85338 - DNA, 15 bp, Homo sapiens
cctaccccctcatat

SEQ ID NO: 85339 - DNA, 15 bp, Homo sapiens
ctaccccctcatatt

SEQ ID NO: 85340 - DNA, 15 bp, Homo sapiens
taccccctcatattt

SEQ ID NO: 85341 - DNA, 15 bp, Homo sapiens
accccctcatattta

SEQ ID NO: 85342 - DNA, 15 bp, Homo sapiens
ccccctcatatttat

SEQ ID NO: 85343 - DNA, 15 bp, Homo sapiens
cccctcatatttatt

SEQ ID NO: 85344 - DNA, 15 bp, Homo sapiens
ccctcatatttattc

SEQ ID NO: 85345 - DNA, 15 bp, Homo sapiens
cctcatatttattct

SEQ ID NO: 85346 - DNA, 15 bp, Homo sapiens
ctcatatttattctg

SEQ ID NO: 85347 - DNA, 15 bp, Homo sapiens
tcatatttattctga

SEQ ID NO: 85348 - DNA, 15 bp, Homo sapiens
catatttattctgaa

SEQ ID NO: 85349 - DNA, 15 bp, Homo sapiens
atatttattctgaaa

SEQ ID NO: 85350 - DNA, 15 bp, Homo sapiens
tatttattctgaaag

SEQ ID NO: 85351 - DNA, 15 bp, Homo sapiens
atttattctgaaagt

SEQ ID NO: 85352 - DNA, 15 bp, Homo sapiens
tttattctgaaagta

SEQ ID NO: 85353 - DNA, 15 bp, Homo sapiens
ttattctgaaagtat

SEQ ID NO: 85354 - DNA, 15 bp, Homo sapiens
tattctgaaagtatt

SEQ ID NO: 85355 - DNA, 15 bp, Homo sapiens
attctgaaagtattc

SEQ ID NO: 85356 - DNA, 15 bp, Homo sapiens
ttctgaaagtattca

SEQ ID NO: 85357 - DNA, 15 bp, Homo sapiens
tctgaaagtattcaa

SEQ ID NO: 85358 - DNA, 15 bp, Homo sapiens
ctgaaagtattcaag

SEQ ID NO: 85359 - DNA, 15 bp, Homo sapiens
tgaaagtattcaagc

SEQ ID NO: 85360 - DNA, 15 bp, Homo sapiens
gaaagtattcaagca

SEQ ID NO: 85361 - DNA, 15 bp, Homo sapiens
aaagtattcaagcat

SEQ ID NO: 85362 - DNA, 15 bp, Homo sapiens
aagtattcaagcatt

SEQ ID NO: 85363 - DNA, 15 bp, Homo sapiens
agtattcaagcatta

SEQ ID NO: 85364 - DNA, 15 bp, Homo sapiens
gtattcaagcattat

SEQ ID NO: 85365 - DNA, 15 bp, Homo sapiens
tattcaagcattata

SEQ ID NO: 85366 - DNA, 15 bp, Homo sapiens
attcaagcattatat

SEQ ID NO: 85367 - DNA, 15 bp, Homo sapiens
ttcaagcattatatt

SEQ ID NO: 85368 - DNA, 15 bp, Homo sapiens
tcaagcattatattg

SEQ ID NO: 85369 - DNA, 15 bp, Homo sapiens
caagcattatattgt

SEQ ID NO: 85370 - DNA, 15 bp, Homo sapiens
aagcattatattgtc

SEQ ID NO: 85371 - DNA, 15 bp, Homo sapiens
agcattatattgtca

SEQ ID NO: 85372 - DNA, 15 bp, Homo sapiens
gcattatattgtcat

SEQ ID NO: 85373 - DNA, 15 bp, Homo sapiens
cattatattgtcatg

SEQ ID NO: 85374 - DNA, 15 bp, Homo sapiens
attatattgtcatgt

SEQ ID NO: 85375 - DNA, 15 bp, Homo sapiens
ttatattgtcatgta

SEQ ID NO: 85376 - DNA, 15 bp, Homo sapiens
tatattgtcatgtaa

SEQ ID NO: 85377 - DNA, 15 bp, Homo sapiens
atattgtcatgtaag

SEQ ID NO: 85378 - DNA, 15 bp, Homo sapiens
tattgtcatgtaaga

SEQ ID NO: 85379 - DNA, 15 bp, Homo sapiens
attgtcatgtaagaa

SEQ ID NO: 85380 - DNA, 15 bp, Homo sapiens
ttgtcatgtaagaaa

SEQ ID NO: 85381 - DNA, 15 bp, Homo sapiens
tgtcatgtaagaaac

SEQ ID NO: 85382 - DNA, 15 bp, Homo sapiens
gtcatgtaagaaact

SEQ ID NO: 85383 - DNA, 15 bp, Homo sapiens
tcatgtaagaaactg

SEQ ID NO: 85384 - DNA, 15 bp, Homo sapiens
catgtaagaaactgg

SEQ ID NO: 85385 - DNA, 15 bp, Homo sapiens
atgtaagaaactgga

SEQ ID NO: 85386 - DNA, 15 bp, Homo sapiens
tgtaagaaactggag

SEQ ID NO: 85387 - DNA, 15 bp, Homo sapiens
gtaagaaactggagc

SEQ ID NO: 85388 - DNA, 15 bp, Homo sapiens
taagaaactggagct

SEQ ID NO: 85389 - DNA, 15 bp, Homo sapiens
aagaaactggagctt

SEQ ID NO: 85390 - DNA, 15 bp, Homo sapiens
agaaactggagcttc

SEQ ID NO: 85391 - DNA, 15 bp, Homo sapiens
gaaactggagcttct

SEQ ID NO: 85392 - DNA, 15 bp, Homo sapiens
aaactggagcttctc

SEQ ID NO: 85393 - DNA, 15 bp, Homo sapiens
aactggagcttctca

SEQ ID NO: 85394 - DNA, 15 bp, Homo sapiens
actggagcttctcat

SEQ ID NO: 85395 - DNA, 15 bp, Homo sapiens
ctggagcttctcatg

SEQ ID NO: 85396 - DNA, 15 bp, Homo sapiens
tggagcttctcatgt

SEQ ID NO: 85397 - DNA, 15 bp, Homo sapiens
ggagcttctcatgtt

SEQ ID NO: 85398 - DNA, 15 bp, Homo sapiens
gagcttctcatgttt

SEQ ID NO: 85399 - DNA, 15 bp, Homo sapiens
agcttctcatgtttg

SEQ ID NO: 85400 - DNA, 15 bp, Homo sapiens
gcttctcatgtttgt

SEQ ID NO: 85401 - DNA, 15 bp, Homo sapiens
cttctcatgtttgta

SEQ ID NO: 85402 - DNA, 15 bp, Homo sapiens
ttctcatgtttgtat

SEQ ID NO: 85403 - DNA, 15 bp, Homo sapiens
tctcatgtttgtatt

SEQ ID NO: 85404 - DNA, 15 bp, Homo sapiens
ctcatgtttgtattg

SEQ ID NO: 85405 - DNA, 15 bp, Homo sapiens
tcatgtttgtattgc

SEQ ID NO: 85406 - DNA, 15 bp, Homo sapiens
catgtttgtattgct

SEQ ID NO: 85407 - DNA, 15 bp, Homo sapiens
atgtttgtattgctg

SEQ ID NO: 85408 - DNA, 15 bp, Homo sapiens
tgtttgtattgctgt

SEQ ID NO: 85409 - DNA, 15 bp, Homo sapiens
gtttgtattgctgta

SEQ ID NO: 85410 - DNA, 15 bp, Homo sapiens
tttgtattgctgtag

SEQ ID NO: 85411 - DNA, 15 bp, Homo sapiens
ttgtattgctgtaga

SEQ ID NO: 85412 - DNA, 15 bp, Homo sapiens
tgtattgctgtagaa

SEQ ID NO: 85413 - DNA, 15 bp, Homo sapiens
gtattgctgtagaag

SEQ ID NO: 85414 - DNA, 15 bp, Homo sapiens
tattgctgtagaagt

SEQ ID NO: 85415 - DNA, 15 bp, Homo sapiens
attgctgtagaagta

SEQ ID NO: 85416 - DNA, 15 bp, Homo sapiens
ttgctgtagaagtaa

SEQ ID NO: 85417 - DNA, 15 bp, Homo sapiens
tgctgtagaagtaaa

SEQ ID NO: 85418 - DNA, 15 bp, Homo sapiens
gctgtagaagtaaac

SEQ ID NO: 85419 - DNA, 15 bp, Homo sapiens
ctgtagaagtaaaca

SEQ ID NO: 85420 - DNA, 15 bp, Homo sapiens
tgtagaagtaaacat

SEQ ID NO: 85421 - DNA, 15 bp, Homo sapiens
gtagaagtaaacatg

SEQ ID NO: 85422 - DNA, 15 bp, Homo sapiens
tagaagtaaacatgt

SEQ ID NO: 85423 - DNA, 15 bp, Homo sapiens
agaagtaaacatgta

SEQ ID NO: 85424 - DNA, 15 bp, Homo sapiens
gaagtaaacatgtat

SEQ ID NO: 85425 - DNA, 15 bp, Homo sapiens
aagtaaacatgtatt

SEQ ID NO: 85426 - DNA, 15 bp, Homo sapiens
agtaaacatgtattt

SEQ ID NO: 85427 - DNA, 15 bp, Homo sapiens
gtaaacatgtatttg

SEQ ID NO: 85428 - DNA, 15 bp, Homo sapiens
taaacatgtatttgc

SEQ ID NO: 85429 - DNA, 15 bp, Homo sapiens
aaacatgtatttgcc

SEQ ID NO: 85430 - DNA, 15 bp, Homo sapiens
aacatgtatttgcca

SEQ ID NO: 85431 - DNA, 15 bp, Homo sapiens
acatgtatttgccat

SEQ ID NO: 85432 - DNA, 15 bp, Homo sapiens
catgtatttgccatg

SEQ ID NO: 85433 - DNA, 15 bp, Homo sapiens
atgtatttgccatgc

SEQ ID NO: 85434 - DNA, 15 bp, Homo sapiens
tgtatttgccatgcg

SEQ ID NO: 85435 - DNA, 15 bp, Homo sapiens
gtatttgccatgcgt

SEQ ID NO: 85436 - DNA, 15 bp, Homo sapiens
tatttgccatgcgtc

SEQ ID NO: 85437 - DNA, 15 bp, Homo sapiens
atttgccatgcgtca

SEQ ID NO: 85438 - DNA, 15 bp, Homo sapiens
tttgccatgcgtcat

SEQ ID NO: 85439 - DNA, 15 bp, Homo sapiens
ttgccatgcgtcatc

SEQ ID NO: 85440 - DNA, 15 bp, Homo sapiens
tgccatgcgtcatca

SEQ ID NO: 85441 - DNA, 15 bp, Homo sapiens
gccatgcgtcatcag

SEQ ID NO: 85442 - DNA, 15 bp, Homo sapiens
ccatgcgtcatcagg

SEQ ID NO: 85443 - DNA, 15 bp, Homo sapiens
catgcgtcatcaggg

SEQ ID NO: 85444 - DNA, 15 bp, Homo sapiens
atgcgtcatcaggga

SEQ ID NO: 85445 - DNA, 15 bp, Homo sapiens
tgcgtcatcagggaa

SEQ ID NO: 85446 - DNA, 15 bp, Homo sapiens
gcgtcatcagggaag

SEQ ID NO: 85447 - DNA, 15 bp, Homo sapiens
cgtcatcagggaagt

SEQ ID NO: 85448 - DNA, 15 bp, Homo sapiens
gtcatcagggaagtt

SEQ ID NO: 85449 - DNA, 15 bp, Homo sapiens
tcatcagggaagttg

SEQ ID NO: 85450 - DNA, 15 bp, Homo sapiens
catcagggaagttgc

SEQ ID NO: 85451 - DNA, 15 bp, Homo sapiens
atcagggaagttgca

SEQ ID NO: 85452 - DNA, 15 bp, Homo sapiens
tcagggaagttgcac

SEQ ID NO: 85453 - DNA, 15 bp, Homo sapiens
cagggaagttgcact

SEQ ID NO: 85454 - DNA, 15 bp, Homo sapiens
agggaagttgcactc

SEQ ID NO: 85455 - DNA, 15 bp, Homo sapiens
gggaagttgcactca

SEQ ID NO: 85456 - DNA, 15 bp, Homo sapiens
ggaagttgcactcac

SEQ ID NO: 85457 - DNA, 15 bp, Homo sapiens
gaagttgcactcacc

SEQ ID NO: 85458 - DNA, 15 bp, Homo sapiens
aagttgcactcaccg

SEQ ID NO: 85459 - DNA, 15 bp, Homo sapiens
agttgcactcaccgt

SEQ ID NO: 85460 - DNA, 15 bp, Homo sapiens
gttgcactcaccgtc

SEQ ID NO: 85461 - DNA, 15 bp, Homo sapiens
ttgcactcaccgtcc

SEQ ID NO: 85462 - DNA, 15 bp, Homo sapiens
tgcactcaccgtcca

SEQ ID NO: 85463 - DNA, 15 bp, Homo sapiens
gcactcaccgtccaa

SEQ ID NO: 85464 - DNA, 15 bp, Homo sapiens
cactcaccgtccaag

SEQ ID NO: 85465 - DNA, 15 bp, Homo sapiens
actcaccgtccaaga

SEQ ID NO: 85466 - DNA, 15 bp, Homo sapiens
ctcaccgtccaagaa

SEQ ID NO: 85467 - DNA, 15 bp, Homo sapiens
tcaccgtccaagaac

SEQ ID NO: 85468 - DNA, 15 bp, Homo sapiens
caccgtccaagaact

SEQ ID NO: 85469 - DNA, 15 bp, Homo sapiens
accgtccaagaactt

SEQ ID NO: 85470 - DNA, 15 bp, Homo sapiens
ccgtccaagaacttt

SEQ ID NO: 85471 - DNA, 15 bp, Homo sapiens
cgtccaagaactttt

SEQ ID NO: 85472 - DNA, 15 bp, Homo sapiens
gtccaagaacttttg

SEQ ID NO: 85473 - DNA, 15 bp, Homo sapiens
tccaagaacttttgt

SEQ ID NO: 85474 - DNA, 15 bp, Homo sapiens
ccaagaacttttgtt

SEQ ID NO: 85475 - DNA, 15 bp, Homo sapiens
caagaacttttgtta

SEQ ID NO: 85476 - DNA, 15 bp, Homo sapiens
aagaacttttgttaa

SEQ ID NO: 85477 - DNA, 15 bp, Homo sapiens
agaacttttgttaaa

SEQ ID NO: 85478 - DNA, 15 bp, Homo sapiens
gaacttttgttaaag

SEQ ID NO: 85479 - DNA, 15 bp, Homo sapiens
aacttttgttaaagt

SEQ ID NO: 85480 - DNA, 15 bp, Homo sapiens
acttttgttaaagta

SEQ ID NO: 85481 - DNA, 15 bp, Homo sapiens
cttttgttaaagtaa

SEQ ID NO: 85482 - DNA, 15 bp, Homo sapiens
ttttgttaaagtaaa

SEQ ID NO: 85483 - DNA, 15 bp, Homo sapiens
tttgttaaagtaaat

SEQ ID NO: 85484 - DNA, 15 bp, Homo sapiens
ttgttaaagtaaatc

SEQ ID NO: 85485 - DNA, 15 bp, Homo sapiens
tgttaaagtaaatct

SEQ ID NO: 85486 - DNA, 15 bp, Homo sapiens
gttaaagtaaatctt

SEQ ID NO: 85487 - DNA, 15 bp, Homo sapiens
ttaaagtaaatcttg

SEQ ID NO: 85488 - DNA, 15 bp, Homo sapiens
taaagtaaatcttgg

SEQ ID NO: 85489 - DNA, 15 bp, Homo sapiens
aaagtaaatcttgga

SEQ ID NO: 85490 - DNA, 15 bp, Homo sapiens
aagtaaatcttggaa

SEQ ID NO: 85491 - DNA, 15 bp, Homo sapiens
agtaaatcttggaat

SEQ ID NO: 85492 - DNA, 15 bp, Homo sapiens
gtaaatcttggaata

SEQ ID NO: 85493 - DNA, 15 bp, Homo sapiens
taaatcttggaatag

SEQ ID NO: 85494 - DNA, 15 bp, Homo sapiens
aaatcttggaatagg

SEQ ID NO: 85495 - DNA, 15 bp, Homo sapiens
aatcttggaataggt

SEQ ID NO: 85496 - DNA, 15 bp, Homo sapiens
atcttggaataggta

SEQ ID NO: 85497 - DNA, 15 bp, Homo sapiens
tcttggaataggtag

SEQ ID NO: 85498 - DNA, 15 bp, Homo sapiens
cttggaataggtagc

SEQ ID NO: 85499 - DNA, 15 bp, Homo sapiens
ttggaataggtagct

SEQ ID NO: 85500 - DNA, 15 bp, Homo sapiens
tggaataggtagctc

SEQ ID NO: 85501 - DNA, 15 bp, Homo sapiens
ggaataggtagctca

SEQ ID NO: 85502 - DNA, 15 bp, Homo sapiens
gaataggtagctcat

SEQ ID NO: 85503 - DNA, 15 bp, Homo sapiens
aataggtagctcatt

SEQ ID NO: 85504 - DNA, 15 bp, Homo sapiens
ataggtagctcattt

SEQ ID NO: 85505 - DNA, 15 bp, Homo sapiens
taggtagctcatttg

SEQ ID NO: 85506 - DNA, 15 bp, Homo sapiens
aggtagctcatttga

SEQ ID NO: 85507 - DNA, 15 bp, Homo sapiens
ggtagctcatttgaa

SEQ ID NO: 85508 - DNA, 15 bp, Homo sapiens
gtagctcatttgaaa

SEQ ID NO: 85509 - DNA, 15 bp, Homo sapiens
tagctcatttgaaat

SEQ ID NO: 85510 - DNA, 15 bp, Homo sapiens
agctcatttgaaatg

SEQ ID NO: 85511 - DNA, 15 bp, Homo sapiens
gctcatttgaaatgt

SEQ ID NO: 85512 - DNA, 15 bp, Homo sapiens
ctcatttgaaatgta

SEQ ID NO: 85513 - DNA, 15 bp, Homo sapiens
tcatttgaaatgtag

SEQ ID NO: 85514 - DNA, 15 bp, Homo sapiens
catttgaaatgtaga

SEQ ID NO: 85515 - DNA, 15 bp, Homo sapiens
atttgaaatgtagaa

SEQ ID NO: 85516 - DNA, 15 bp, Homo sapiens
tttgaaatgtagaaa

SEQ ID NO: 85517 - DNA, 15 bp, Homo sapiens
ttgaaatgtagaaaa

SEQ ID NO: 85518 - DNA, 15 bp, Homo sapiens
tgaaatgtagaaaaa

SEQ ID NO: 85519 - DNA, 15 bp, Homo sapiens
gaaatgtagaaaaaa

SEQ ID NO: 85520 - DNA, 15 bp, Homo sapiens
aaatgtagaaaaaat

SEQ ID NO: 85521 - DNA, 15 bp, Homo sapiens
aatgtagaaaaaatt

SEQ ID NO: 85522 - DNA, 15 bp, Homo sapiens
atgtagaaaaaatta

SEQ ID NO: 85523 - DNA, 15 bp, Homo sapiens
tgtagaaaaaattaa

SEQ ID NO: 85524 - DNA, 15 bp, Homo sapiens
gtagaaaaaattaaa

SEQ ID NO: 85525 - DNA, 15 bp, Homo sapiens
tagaaaaaattaaat

SEQ ID NO: 85526 - DNA, 15 bp, Homo sapiens
agaaaaaattaaatc

SEQ ID NO: 85527 - DNA, 15 bp, Homo sapiens
gaaaaaattaaatcc

SEQ ID NO: 85528 - DNA, 15 bp, Homo sapiens
aaaaaattaaatcca

SEQ ID NO: 85529 - DNA, 15 bp, Homo sapiens
aaaaattaaatccat

SEQ ID NO: 85530 - DNA, 15 bp, Homo sapiens
aaaattaaatccata

SEQ ID NO: 85531 - DNA, 15 bp, Homo sapiens
aaattaaatccatat

SEQ ID NO: 85532 - DNA, 15 bp, Homo sapiens
aattaaatccatatc

SEQ ID NO: 85533 - DNA, 15 bp, Homo sapiens
attaaatccatatct

SEQ ID NO: 85534 - DNA, 15 bp, Homo sapiens
ttaaatccatatctg

SEQ ID NO: 85535 - DNA, 15 bp, Homo sapiens
taaatccatatctga

SEQ ID NO: 85536 - DNA, 15 bp, Homo sapiens
aaatccatatctgaa

SEQ ID NO: 85537 - DNA, 15 bp, Homo sapiens
aatccatatctgaat

SEQ ID NO: 85538 - DNA, 15 bp, Homo sapiens
atccatatctgaatt

SEQ ID NO: 85539 - DNA, 15 bp, Homo sapiens
tccatatctgaattt

SEQ ID NO: 85540 - DNA, 15 bp, Homo sapiens
ccatatctgaatttt

SEQ ID NO: 85541 - DNA, 15 bp, Homo sapiens
catatctgaattttg

SEQ ID NO: 85542 - DNA, 15 bp, Homo sapiens
atatctgaattttgt

SEQ ID NO: 85543 - DNA, 15 bp, Homo sapiens
tatctgaattttgtt

SEQ ID NO: 85544 - DNA, 15 bp, Homo sapiens
atctgaattttgttt

SEQ ID NO: 85545 - DNA, 15 bp, Homo sapiens
tctgaattttgttta

SEQ ID NO: 85546 - DNA, 15 bp, Homo sapiens
ctgaattttgtttat

SEQ ID NO: 85547 - DNA, 15 bp, Homo sapiens
tgaattttgtttata

SEQ ID NO: 85548 - DNA, 15 bp, Homo sapiens
gaattttgtttatat

SEQ ID NO: 85549 - DNA, 15 bp, Homo sapiens
aattttgtttatatg

SEQ ID NO: 85550 - DNA, 15 bp, Homo sapiens
attttgtttatatgt

SEQ ID NO: 85551 - DNA, 15 bp, Homo sapiens
ttttgtttatatgta

SEQ ID NO: 85552 - DNA, 15 bp, Homo sapiens
tttgtttatatgtat

SEQ ID NO: 85553 - DNA, 15 bp, Homo sapiens
ttgtttatatgtatg

SEQ ID NO: 85554 - DNA, 15 bp, Homo sapiens
tgtttatatgtatgt

SEQ ID NO: 85555 - DNA, 15 bp, Homo sapiens
gtttatatgtatgta

SEQ ID NO: 85556 - DNA, 15 bp, Homo sapiens
tttatatgtatgtac

SEQ ID NO: 85557 - DNA, 15 bp, Homo sapiens
ttatatgtatgtaca

SEQ ID NO: 85558 - DNA, 15 bp, Homo sapiens
tatatgtatgtacac

SEQ ID NO: 85559 - DNA, 15 bp, Homo sapiens
atatgtatgtacacg

SEQ ID NO: 85560 - DNA, 15 bp, Homo sapiens
tatgtatgtacacgt

SEQ ID NO: 85561 - DNA, 15 bp, Homo sapiens
atgtatgtacacgta

SEQ ID NO: 85562 - DNA, 15 bp, Homo sapiens
tgtatgtacacgtaa

SEQ ID NO: 85563 - DNA, 15 bp, Homo sapiens
gtatgtacacgtaaa

SEQ ID NO: 85564 - DNA, 15 bp, Homo sapiens
tatgtacacgtaaac

SEQ ID NO: 85565 - DNA, 15 bp, Homo sapiens
atgtacacgtaaact

SEQ ID NO: 85566 - DNA, 15 bp, Homo sapiens
tgtacacgtaaacta

SEQ ID NO: 85567 - DNA, 15 bp, Homo sapiens
gtacacgtaaactaa

SEQ ID NO: 85568 - DNA, 15 bp, Homo sapiens
tacacgtaaactaaa

SEQ ID NO: 85569 - DNA, 15 bp, Homo sapiens
acacgtaaactaaaa

SEQ ID NO: 85570 - DNA, 15 bp, Homo sapiens
cacgtaaactaaaaa

SEQ ID NO: 85571 - DNA, 15 bp, Homo sapiens
acgtaaactaaaaac

SEQ ID NO: 85572 - DNA, 15 bp, Homo sapiens
cgtaaactaaaaacg

SEQ ID NO: 85573 - DNA, 15 bp, Homo sapiens
gtaaactaaaaacgt

SEQ ID NO: 85574 - DNA, 15 bp, Homo sapiens
taaactaaaaacgta

SEQ ID NO: 85575 - DNA, 15 bp, Homo sapiens
aaactaaaaacgtat

SEQ ID NO: 85576 - DNA, 15 bp, Homo sapiens
aactaaaaacgtatt

SEQ ID NO: 85577 - DNA, 15 bp, Homo sapiens
actaaaaacgtattt

SEQ ID NO: 85578 - DNA, 15 bp, Homo sapiens
ctaaaaacgtattta

SEQ ID NO: 85579 - DNA, 15 bp, Homo sapiens
taaaaacgtatttaa

SEQ ID NO: 85580 - DNA, 15 bp, Homo sapiens
aaaaacgtatttaaa

SEQ ID NO: 85581 - DNA, 15 bp, Homo sapiens
aaaacgtatttaaag

SEQ ID NO: 85582 - DNA, 15 bp, Homo sapiens
aaacgtatttaaagc

SEQ ID NO: 85583 - DNA, 15 bp, Homo sapiens
aacgtatttaaagct

SEQ ID NO: 85584 - DNA, 15 bp, Homo sapiens
acgtatttaaagcta

SEQ ID NO: 85585 - DNA, 15 bp, Homo sapiens
cgtatttaaagctag

SEQ ID NO: 85586 - DNA, 15 bp, Homo sapiens
gtatttaaagctagt

SEQ ID NO: 85587 - DNA, 15 bp, Homo sapiens
tatttaaagctagta

SEQ ID NO: 85588 - DNA, 15 bp, Homo sapiens
atttaaagctagtat

SEQ ID NO: 85589 - DNA, 15 bp, Homo sapiens
tttaaagctagtatt

SEQ ID NO: 85590 - DNA, 15 bp, Homo sapiens
ttaaagctagtatta

SEQ ID NO: 85591 - DNA, 15 bp, Homo sapiens
taaagctagtattag

SEQ ID NO: 85592 - DNA, 15 bp, Homo sapiens
aaagctagtattaga

SEQ ID NO: 85593 - DNA, 15 bp, Homo sapiens
aagctagtattagat

SEQ ID NO: 85594 - DNA, 15 bp, Homo sapiens
agctagtattagatg

SEQ ID NO: 85595 - DNA, 15 bp, Homo sapiens
gctagtattagatga

SEQ ID NO: 85596 - DNA, 15 bp, Homo sapiens
ctagtattagatgag

SEQ ID NO: 85597 - DNA, 15 bp, Homo sapiens
tagtattagatgaga

SEQ ID NO: 85598 - DNA, 15 bp, Homo sapiens
agtattagatgagaa

SEQ ID NO: 85599 - DNA, 15 bp, Homo sapiens
gtattagatgagaaa

SEQ ID NO: 85600 - DNA, 15 bp, Homo sapiens
tattagatgagaaaa

SEQ ID NO: 85601 - DNA, 15 bp, Homo sapiens
attagatgagaaaag

SEQ ID NO: 85602 - DNA, 15 bp, Homo sapiens
ttagatgagaaaaga

SEQ ID NO: 85603 - DNA, 15 bp, Homo sapiens
tagatgagaaaagag

SEQ ID NO: 85604 - DNA, 15 bp, Homo sapiens
agatgagaaaagagg

SEQ ID NO: 85605 - DNA, 15 bp, Homo sapiens
gatgagaaaagaggt

SEQ ID NO: 85606 - DNA, 15 bp, Homo sapiens
atgagaaaagaggtt

SEQ ID NO: 85607 - DNA, 15 bp, Homo sapiens
tgagaaaagaggttt

SEQ ID NO: 85608 - DNA, 15 bp, Homo sapiens
gagaaaagaggtttt

SEQ ID NO: 85609 - DNA, 15 bp, Homo sapiens
agaaaagaggttttt

SEQ ID NO: 85610 - DNA, 15 bp, Homo sapiens
gaaaagaggtttttt

SEQ ID NO: 85611 - DNA, 15 bp, Homo sapiens
aaaagaggttttttt

SEQ ID NO: 85612 - DNA, 15 bp, Homo sapiens
aaagaggttttttta

SEQ ID NO: 85613 - DNA, 15 bp, Homo sapiens
aagaggtttttttac

SEQ ID NO: 85614 - DNA, 15 bp, Homo sapiens
agaggtttttttact

SEQ ID NO: 85615 - DNA, 15 bp, Homo sapiens
gaggtttttttactt

SEQ ID NO: 85616 - DNA, 15 bp, Homo sapiens
aggtttttttactta

SEQ ID NO: 85617 - DNA, 15 bp, Homo sapiens
ggtttttttacttaa

SEQ ID NO: 85618 - DNA, 15 bp, Homo sapiens
gtttttttacttaaa

SEQ ID NO: 85619 - DNA, 15 bp, Homo sapiens
tttttttacttaaaa

SEQ ID NO: 85620 - DNA, 15 bp, Homo sapiens
ttttttacttaaaat

SEQ ID NO: 85621 - DNA, 15 bp, Homo sapiens
tttttacttaaaatt

SEQ ID NO: 85622 - DNA, 15 bp, Homo sapiens
ttttacttaaaattt

SEQ ID NO: 85623 - DNA, 15 bp, Homo sapiens
tttacttaaaatttt

SEQ ID NO: 85624 - DNA, 15 bp, Homo sapiens
ttacttaaaatttta

SEQ ID NO: 85625 - DNA, 15 bp, Homo sapiens
tacttaaaattttaa

SEQ ID NO: 85626 - DNA, 15 bp, Homo sapiens
acttaaaattttaag

SEQ ID NO: 85627 - DNA, 15 bp, Homo sapiens
cttaaaattttaagg

SEQ ID NO: 85628 - DNA, 15 bp, Homo sapiens
ttaaaattttaaggc

SEQ ID NO: 85629 - DNA, 15 bp, Homo sapiens
taaaattttaaggca

SEQ ID NO: 85630 - DNA, 15 bp, Homo sapiens
aaaattttaaggcaa

SEQ ID NO: 85631 - DNA, 15 bp, Homo sapiens
aaattttaaggcaaa

SEQ ID NO: 85632 - DNA, 15 bp, Homo sapiens
aattttaaggcaaaa

SEQ ID NO: 85633 - DNA, 15 bp, Homo sapiens
attttaaggcaaaag

SEQ ID NO: 85634 - DNA, 15 bp, Homo sapiens
ttttaaggcaaaagt

SEQ ID NO: 85635 - DNA, 15 bp, Homo sapiens
tttaaggcaaaagta

SEQ ID NO: 85636 - DNA, 15 bp, Homo sapiens
ttaaggcaaaagtag

SEQ ID NO: 85637 - DNA, 15 bp, Homo sapiens
taaggcaaaagtagt

SEQ ID NO: 85638 - DNA, 15 bp, Homo sapiens
aaggcaaaagtagtt

SEQ ID NO: 85639 - DNA, 15 bp, Homo sapiens
aggcaaaagtagttt

SEQ ID NO: 85640 - DNA, 15 bp, Homo sapiens
ggcaaaagtagttta

SEQ ID NO: 85641 - DNA, 15 bp, Homo sapiens
gcaaaagtagtttat

SEQ ID NO: 85642 - DNA, 15 bp, Homo sapiens
caaaagtagtttatc

SEQ ID NO: 85643 - DNA, 15 bp, Homo sapiens
aaaagtagtttatct

SEQ ID NO: 85644 - DNA, 15 bp, Homo sapiens
aaagtagtttatctt

SEQ ID NO: 85645 - DNA, 15 bp, Homo sapiens
aagtagtttatctta

SEQ ID NO: 85646 - DNA, 15 bp, Homo sapiens
agtagtttatcttag

SEQ ID NO: 85647 - DNA, 15 bp, Homo sapiens
gtagtttatcttaga

SEQ ID NO: 85648 - DNA, 15 bp, Homo sapiens
tagtttatcttagat

SEQ ID NO: 85649 - DNA, 15 bp, Homo sapiens
agtttatcttagatc

SEQ ID NO: 85650 - DNA, 15 bp, Homo sapiens
gtttatcttagatct

SEQ ID NO: 85651 - DNA, 15 bp, Homo sapiens
tttatcttagatctt

SEQ ID NO: 85652 - DNA, 15 bp, Homo sapiens
ttatcttagatcttg

SEQ ID NO: 85653 - DNA, 15 bp, Homo sapiens
tatcttagatcttgt

SEQ ID NO: 85654 - DNA, 15 bp, Homo sapiens
atcttagatcttgtg

SEQ ID NO: 85655 - DNA, 15 bp, Homo sapiens
tcttagatcttgtga

SEQ ID NO: 85656 - DNA, 15 bp, Homo sapiens
cttagatcttgtgag

SEQ ID NO: 85657 - DNA, 15 bp, Homo sapiens
ttagatcttgtgaga

SEQ ID NO: 85658 - DNA, 15 bp, Homo sapiens
tagatcttgtgagat

SEQ ID NO: 85659 - DNA, 15 bp, Homo sapiens
agatcttgtgagatt

SEQ ID NO: 85660 - DNA, 15 bp, Homo sapiens
gatcttgtgagattg

SEQ ID NO: 85661 - DNA, 15 bp, Homo sapiens
atcttgtgagattgt

SEQ ID NO: 85662 - DNA, 15 bp, Homo sapiens
tcttgtgagattgta

SEQ ID NO: 85663 - DNA, 15 bp, Homo sapiens
cttgtgagattgtat

SEQ ID NO: 85664 - DNA, 15 bp, Homo sapiens
ttgtgagattgtatt

SEQ ID NO: 85665 - DNA, 15 bp, Homo sapiens
tgtgagattgtattt

SEQ ID NO: 85666 - DNA, 15 bp, Homo sapiens
gtgagattgtatttt

SEQ ID NO: 85667 - DNA, 15 bp, Homo sapiens
tgagattgtattttt

SEQ ID NO: 85668 - DNA, 15 bp, Homo sapiens
gagattgtatttttg

SEQ ID NO: 85669 - DNA, 15 bp, Homo sapiens
agattgtatttttgg

SEQ ID NO: 85670 - DNA, 15 bp, Homo sapiens
gattgtatttttggt

SEQ ID NO: 85671 - DNA, 15 bp, Homo sapiens
attgtatttttggtt

SEQ ID NO: 85672 - DNA, 15 bp, Homo sapiens
ttgtatttttggttt

SEQ ID NO: 85673 - DNA, 15 bp, Homo sapiens
tgtatttttggttta

SEQ ID NO: 85674 - DNA, 15 bp, Homo sapiens
gtatttttggtttaa

SEQ ID NO: 85675 - DNA, 15 bp, Homo sapiens
tatttttggtttaaa

SEQ ID NO: 85676 - DNA, 15 bp, Homo sapiens
atttttggtttaaaa

SEQ ID NO: 85677 - DNA, 15 bp, Homo sapiens
tttttggtttaaaat

SEQ ID NO: 85678 - DNA, 15 bp, Homo sapiens
ttttggtttaaaatt

SEQ ID NO: 85679 - DNA, 15 bp, Homo sapiens
tttggtttaaaattt

SEQ ID NO: 85680 - DNA, 15 bp, Homo sapiens
ttggtttaaaatttg

SEQ ID NO: 85681 - DNA, 15 bp, Homo sapiens
tggtttaaaatttga

SEQ ID NO: 85682 - DNA, 15 bp, Homo sapiens
ggtttaaaatttgag

SEQ ID NO: 85683 - DNA, 15 bp, Homo sapiens
gtttaaaatttgaga

SEQ ID NO: 85684 - DNA, 15 bp, Homo sapiens
tttaaaatttgagaa

SEQ ID NO: 85685 - DNA, 15 bp, Homo sapiens
ttaaaatttgagaat

SEQ ID NO: 85686 - DNA, 15 bp, Homo sapiens
taaaatttgagaatt

SEQ ID NO: 85687 - DNA, 15 bp, Homo sapiens
aaaatttgagaattt

SEQ ID NO: 85688 - DNA, 15 bp, Homo sapiens
aaatttgagaatttg

SEQ ID NO: 85689 - DNA, 15 bp, Homo sapiens
aatttgagaatttga

SEQ ID NO: 85690 - DNA, 15 bp, Homo sapiens
atttgagaatttgag

SEQ ID NO: 85691 - DNA, 15 bp, Homo sapiens
tttgagaatttgagt

SEQ ID NO: 85692 - DNA, 15 bp, Homo sapiens
ttgagaatttgagtg

SEQ ID NO: 85693 - DNA, 15 bp, Homo sapiens
tgagaatttgagtga

SEQ ID NO: 85694 - DNA, 15 bp, Homo sapiens
gagaatttgagtgaa

SEQ ID NO: 85695 - DNA, 15 bp, Homo sapiens
agaatttgagtgaag

SEQ ID NO: 85696 - DNA, 15 bp, Homo sapiens
gaatttgagtgaaga

SEQ ID NO: 85697 - DNA, 15 bp, Homo sapiens
aatttgagtgaagaa

SEQ ID NO: 85698 - DNA, 15 bp, Homo sapiens
atttgagtgaagaaa

SEQ ID NO: 85699 - DNA, 15 bp, Homo sapiens
tttgagtgaagaaaa

SEQ ID NO: 85700 - DNA, 15 bp, Homo sapiens
ttgagtgaagaaaaa

SEQ ID NO: 85701 - DNA, 15 bp, Homo sapiens
tgagtgaagaaaaat

SEQ ID NO: 85702 - DNA, 15 bp, Homo sapiens
gagtgaagaaaaatc

SEQ ID NO: 85703 - DNA, 15 bp, Homo sapiens
agtgaagaaaaatca

SEQ ID NO: 85704 - DNA, 15 bp, Homo sapiens
gtgaagaaaaatcat

SEQ ID NO: 85705 - DNA, 15 bp, Homo sapiens
tgaagaaaaatcatg

SEQ ID NO: 85706 - DNA, 15 bp, Homo sapiens
gaagaaaaatcatgt

SEQ ID NO: 85707 - DNA, 15 bp, Homo sapiens
aagaaaaatcatgtg

SEQ ID NO: 85708 - DNA, 15 bp, Homo sapiens
agaaaaatcatgtga

SEQ ID NO: 85709 - DNA, 15 bp, Homo sapiens
gaaaaatcatgtgaa

SEQ ID NO: 85710 - DNA, 15 bp, Homo sapiens
aaaaatcatgtgaat

SEQ ID NO: 85711 - DNA, 15 bp, Homo sapiens
aaaatcatgtgaatg

SEQ ID NO: 85712 - DNA, 15 bp, Homo sapiens
aaatcatgtgaatga

SEQ ID NO: 85713 - DNA, 15 bp, Homo sapiens
aatcatgtgaatgaa

SEQ ID NO: 85714 - DNA, 15 bp, Homo sapiens
atcatgtgaatgaaa

SEQ ID NO: 85715 - DNA, 15 bp, Homo sapiens
tcatgtgaatgaaaa

SEQ ID NO: 85716 - DNA, 15 bp, Homo sapiens
catgtgaatgaaaat

SEQ ID NO: 85717 - DNA, 15 bp, Homo sapiens
atgtgaatgaaaatg

SEQ ID NO: 85718 - DNA, 15 bp, Homo sapiens
tgtgaatgaaaatgc

SEQ ID NO: 85719 - DNA, 15 bp, Homo sapiens
gtgaatgaaaatgca

SEQ ID NO: 85720 - DNA, 15 bp, Homo sapiens
tgaatgaaaatgcaa

SEQ ID NO: 85721 - DNA, 15 bp, Homo sapiens
gaatgaaaatgcaac

SEQ ID NO: 85722 - DNA, 15 bp, Homo sapiens
aatgaaaatgcaaca

SEQ ID NO: 85723 - DNA, 15 bp, Homo sapiens
atgaaaatgcaacag

SEQ ID NO: 85724 - DNA, 15 bp, Homo sapiens
tgaaaatgcaacaga

SEQ ID NO: 85725 - DNA, 15 bp, Homo sapiens
gaaaatgcaacagat

SEQ ID NO: 85726 - DNA, 15 bp, Homo sapiens
aaaatgcaacagata

SEQ ID NO: 85727 - DNA, 15 bp, Homo sapiens
aaatgcaacagataa

SEQ ID NO: 85728 - DNA, 15 bp, Homo sapiens
aatgcaacagataac

SEQ ID NO: 85729 - DNA, 15 bp, Homo sapiens
atgcaacagataact

SEQ ID NO: 85730 - DNA, 15 bp, Homo sapiens
tgcaacagataactc

SEQ ID NO: 85731 - DNA, 15 bp, Homo sapiens
gcaacagataactca

SEQ ID NO: 85732 - DNA, 15 bp, Homo sapiens
caacagataactcag

SEQ ID NO: 85733 - DNA, 15 bp, Homo sapiens
aacagataactcaga

SEQ ID NO: 85734 - DNA, 15 bp, Homo sapiens
acagataactcagat

SEQ ID NO: 85735 - DNA, 15 bp, Homo sapiens
cagataactcagatt

SEQ ID NO: 85736 - DNA, 15 bp, Homo sapiens
agataactcagattg

SEQ ID NO: 85737 - DNA, 15 bp, Homo sapiens
gataactcagattgc

SEQ ID NO: 85738 - DNA, 15 bp, Homo sapiens
ataactcagattgcc

SEQ ID NO: 85739 - DNA, 15 bp, Homo sapiens
taactcagattgcct

SEQ ID NO: 85740 - DNA, 15 bp, Homo sapiens
aactcagattgcctt

SEQ ID NO: 85741 - DNA, 15 bp, Homo sapiens
actcagattgcctta

SEQ ID NO: 85742 - DNA, 15 bp, Homo sapiens
ctcagattgccttat

SEQ ID NO: 85743 - DNA, 15 bp, Homo sapiens
tcagattgccttata

SEQ ID NO: 85744 - DNA, 15 bp, Homo sapiens
cagattgccttataa

SEQ ID NO: 85745 - DNA, 15 bp, Homo sapiens
agattgccttataat

SEQ ID NO: 85746 - DNA, 15 bp, Homo sapiens
gattgccttataata

SEQ ID NO: 85747 - DNA, 15 bp, Homo sapiens
attgccttataatag

SEQ ID NO: 85748 - DNA, 15 bp, Homo sapiens
ttgccttataatagt

SEQ ID NO: 85749 - DNA, 15 bp, Homo sapiens
tgccttataatagtc

SEQ ID NO: 85750 - DNA, 15 bp, Homo sapiens
gccttataatagtct

SEQ ID NO: 85751 - DNA, 15 bp, Homo sapiens
ccttataatagtctt

SEQ ID NO: 85752 - DNA, 15 bp, Homo sapiens
cttataatagtcttt

SEQ ID NO: 85753 - DNA, 15 bp, Homo sapiens
ttataatagtctttg

SEQ ID NO: 85754 - DNA, 15 bp, Homo sapiens
tataatagtctttgt

SEQ ID NO: 85755 - DNA, 15 bp, Homo sapiens
ataatagtctttgtg

SEQ ID NO: 85756 - DNA, 15 bp, Homo sapiens
taatagtctttgtgt

SEQ ID NO: 85757 - DNA, 15 bp, Homo sapiens
aatagtctttgtgtt

SEQ ID NO: 85758 - DNA, 15 bp, Homo sapiens
atagtctttgtgttt

SEQ ID NO: 85759 - DNA, 15 bp, Homo sapiens
tagtctttgtgttta

SEQ ID NO: 85760 - DNA, 15 bp, Homo sapiens
agtctttgtgtttac

SEQ ID NO: 85761 - DNA, 15 bp, Homo sapiens
gtctttgtgtttacc

SEQ ID NO: 85762 - DNA, 15 bp, Homo sapiens
tctttgtgtttacct

SEQ ID NO: 85763 - DNA, 15 bp, Homo sapiens
ctttgtgtttacctt

SEQ ID NO: 85764 - DNA, 15 bp, Homo sapiens
tttgtgtttaccttt

SEQ ID NO: 85765 - DNA, 15 bp, Homo sapiens
ttgtgtttaccttta

SEQ ID NO: 85766 - DNA, 15 bp, Homo sapiens
tgtgtttacctttat

SEQ ID NO: 85767 - DNA, 15 bp, Homo sapiens
gtgtttacctttatt

SEQ ID NO: 85768 - DNA, 15 bp, Homo sapiens
tgtttacctttattc

SEQ ID NO: 85769 - DNA, 15 bp, Homo sapiens
gtttacctttattca

SEQ ID NO: 85770 - DNA, 15 bp, Homo sapiens
tttacctttattcag

SEQ ID NO: 85771 - DNA, 15 bp, Homo sapiens
ttacctttattcaga

SEQ ID NO: 85772 - DNA, 15 bp, Homo sapiens
tacctttattcagaa

SEQ ID NO: 85773 - DNA, 15 bp, Homo sapiens
acctttattcagaat

SEQ ID NO: 85774 - DNA, 15 bp, Homo sapiens
cctttattcagaata

SEQ ID NO: 85775 - DNA, 15 bp, Homo sapiens
ctttattcagaatat

SEQ ID NO: 85776 - DNA, 15 bp, Homo sapiens
tttattcagaatatc

SEQ ID NO: 85777 - DNA, 15 bp, Homo sapiens
ttattcagaatatca

SEQ ID NO: 85778 - DNA, 15 bp, Homo sapiens
tattcagaatatcaa

SEQ ID NO: 85779 - DNA, 15 bp, Homo sapiens
attcagaatatcaaa

SEQ ID NO: 85780 - DNA, 15 bp, Homo sapiens
ttcagaatatcaaat

SEQ ID NO: 85781 - DNA, 15 bp, Homo sapiens
tcagaatatcaaatg

SEQ ID NO: 85782 - DNA, 15 bp, Homo sapiens
cagaatatcaaatga

SEQ ID NO: 85783 - DNA, 15 bp, Homo sapiens
agaatatcaaatgat

SEQ ID NO: 85784 - DNA, 15 bp, Homo sapiens
gaatatcaaatgata

SEQ ID NO: 85785 - DNA, 15 bp, Homo sapiens
aatatcaaatgatag

SEQ ID NO: 85786 - DNA, 15 bp, Homo sapiens
atatcaaatgatagt

SEQ ID NO: 85787 - DNA, 15 bp, Homo sapiens
tatcaaatgatagtt

SEQ ID NO: 85788 - DNA, 15 bp, Homo sapiens
atcaaatgatagttt

SEQ ID NO: 85789 - DNA, 15 bp, Homo sapiens
tcaaatgatagttta

SEQ ID NO: 85790 - DNA, 15 bp, Homo sapiens
caaatgatagtttat

SEQ ID NO: 85791 - DNA, 15 bp, Homo sapiens
aaatgatagtttatt

SEQ ID NO: 85792 - DNA, 15 bp, Homo sapiens
aatgatagtttattt

SEQ ID NO: 85793 - DNA, 15 bp, Homo sapiens
atgatagtttatttt

SEQ ID NO: 85794 - DNA, 15 bp, Homo sapiens
tgatagtttattttg

SEQ ID NO: 85795 - DNA, 15 bp, Homo sapiens
gatagtttattttgt

SEQ ID NO: 85796 - DNA, 15 bp, Homo sapiens
atagtttattttgtt

SEQ ID NO: 85797 - DNA, 15 bp, Homo sapiens
tagtttattttgttg

SEQ ID NO: 85798 - DNA, 15 bp, Homo sapiens
agtttattttgttga

SEQ ID NO: 85799 - DNA, 15 bp, Homo sapiens
gtttattttgttgac

SEQ ID NO: 85800 - DNA, 15 bp, Homo sapiens
tttattttgttgact

SEQ ID NO: 85801 - DNA, 15 bp, Homo sapiens
ttattttgttgactt

SEQ ID NO: 85802 - DNA, 15 bp, Homo sapiens
tattttgttgacttt

SEQ ID NO: 85803 - DNA, 15 bp, Homo sapiens
attttgttgactttt

SEQ ID NO: 85804 - DNA, 15 bp, Homo sapiens
ttttgttgacttttt

SEQ ID NO: 85805 - DNA, 15 bp, Homo sapiens
tttgttgactttttg

SEQ ID NO: 85806 - DNA, 15 bp, Homo sapiens
ttgttgactttttgc

SEQ ID NO: 85807 - DNA, 15 bp, Homo sapiens
tgttgactttttgca

SEQ ID NO: 85808 - DNA, 15 bp, Homo sapiens
gttgactttttgcaa

SEQ ID NO: 85809 - DNA, 15 bp, Homo sapiens
ttgactttttgcaaa

SEQ ID NO: 85810 - DNA, 15 bp, Homo sapiens
tgactttttgcaaat

SEQ ID NO: 85811 - DNA, 15 bp, Homo sapiens
gactttttgcaaatg

SEQ ID NO: 85812 - DNA, 15 bp, Homo sapiens
actttttgcaaatgt

SEQ ID NO: 85813 - DNA, 15 bp, Homo sapiens
ctttttgcaaatgtt

SEQ ID NO: 85814 - DNA, 15 bp, Homo sapiens
tttttgcaaatgttt

SEQ ID NO: 85815 - DNA, 15 bp, Homo sapiens
ttttgcaaatgttta

SEQ ID NO: 85816 - DNA, 15 bp, Homo sapiens
tttgcaaatgtttaa

SEQ ID NO: 85817 - DNA, 15 bp, Homo sapiens
ttgcaaatgtttaac

SEQ ID NO: 85818 - DNA, 15 bp, Homo sapiens
tgcaaatgtttaaca

SEQ ID NO: 85819 - DNA, 15 bp, Homo sapiens
gcaaatgtttaacat

SEQ ID NO: 85820 - DNA, 15 bp, Homo sapiens
caaatgtttaacata

SEQ ID NO: 85821 - DNA, 15 bp, Homo sapiens
aaatgtttaacatag

SEQ ID NO: 85822 - DNA, 15 bp, Homo sapiens
aatgtttaacatagg

SEQ ID NO: 85823 - DNA, 15 bp, Homo sapiens
atgtttaacataggt

SEQ ID NO: 85824 - DNA, 15 bp, Homo sapiens
tgtttaacataggtg

SEQ ID NO: 85825 - DNA, 15 bp, Homo sapiens
gtttaacataggtga

SEQ ID NO: 85826 - DNA, 15 bp, Homo sapiens
tttaacataggtgac

SEQ ID NO: 85827 - DNA, 15 bp, Homo sapiens
ttaacataggtgaca

SEQ ID NO: 85828 - DNA, 15 bp, Homo sapiens
taacataggtgacag

SEQ ID NO: 85829 - DNA, 15 bp, Homo sapiens
aacataggtgacaga

SEQ ID NO: 85830 - DNA, 15 bp, Homo sapiens
acataggtgacagat

SEQ ID NO: 85831 - DNA, 15 bp, Homo sapiens
cataggtgacagatt

SEQ ID NO: 85832 - DNA, 15 bp, Homo sapiens
ataggtgacagattt

SEQ ID NO: 85833 - DNA, 15 bp, Homo sapiens
taggtgacagatttt

SEQ ID NO: 85834 - DNA, 15 bp, Homo sapiens
aggtgacagattttc

SEQ ID NO: 85835 - DNA, 15 bp, Homo sapiens
ggtgacagattttct

SEQ ID NO: 85836 - DNA, 15 bp, Homo sapiens
gtgacagattttctt

SEQ ID NO: 85837 - DNA, 15 bp, Homo sapiens
tgacagattttcttt

SEQ ID NO: 85838 - DNA, 15 bp, Homo sapiens
cagattttctttttt

SEQ ID NO: 85839 - DNA, 15 bp, Homo sapiens
agattttctttttta

SEQ ID NO: 85840 - DNA, 15 bp, Homo sapiens
gattttcttttttaa

SEQ ID NO: 85841 - DNA, 15 bp, Homo sapiens
attttcttttttaaa

SEQ ID NO: 85842 - DNA, 15 bp, Homo sapiens
ttttcttttttaaaa

SEQ ID NO: 85843 - DNA, 15 bp, Homo sapiens
tttcttttttaaaaa

SEQ ID NO: 85844 - DNA, 15 bp, Homo sapiens
ttcttttttaaaaaa

SEQ ID NO: 85845 - DNA, 15 bp, Homo sapiens
tcttttttaaaaaaa

SEQ ID NO: 85846 - DNA, 15 bp, Homo sapiens
cttttttaaaaaaat

SEQ ID NO: 85847 - DNA, 15 bp, Homo sapiens
ttttttaaaaaaata

SEQ ID NO: 85848 - DNA, 15 bp, Homo sapiens
tttttaaaaaaataa

SEQ ID NO: 85849 - DNA, 15 bp, Homo sapiens
ttttaaaaaaataaa

SEQ ID NO: 85850 - DNA, 15 bp, Homo sapiens
tttaaaaaaataaaa

SEQ ID NO: 85851 - DNA, 15 bp, Homo sapiens
ttaaaaaaataaaac

SEQ ID NO: 85852 - DNA, 15 bp, Homo sapiens
taaaaaaataaaaca

SEQ ID NO: 85853 - DNA, 15 bp, Homo sapiens
aaaaaaataaaacat

SEQ ID NO: 85854 - DNA, 15 bp, Homo sapiens
aaaaaataaaacatc

SEQ ID NO: 85855 - DNA, 15 bp, Homo sapiens
aaaaataaaacatca

SEQ ID NO: 85856 - DNA, 15 bp, Homo sapiens
aaaataaaacatcat

SEQ ID NO: 85857 - DNA, 15 bp, Homo sapiens
aaataaaacatcatt

SEQ ID NO: 85858 - DNA, 15 bp, Homo sapiens
aataaaacatcatta

SEQ ID NO: 85859 - DNA, 15 bp, Homo sapiens
ataaaacatcattaa

SEQ ID NO: 85860 - DNA, 15 bp, Homo sapiens
taaaacatcattaat

SEQ ID NO: 85861 - DNA, 15 bp, Homo sapiens
aaaacatcattaatt

SEQ ID NO: 85862 - DNA, 15 bp, Homo sapiens
aaacatcattaatta

SEQ ID NO: 85863 - DNA, 15 bp, Homo sapiens
aacatcattaattaa

SEQ ID NO: 85864 - DNA, 15 bp, Homo sapiens
acatcattaattaaa

SEQ ID NO: 85865 - DNA, 15 bp, Homo sapiens
catcattaattaaat

SEQ ID NO: 85866 - DNA, 15 bp, Homo sapiens
atcattaattaaata

SEQ ID NO: 85867 - DNA, 15 bp, Homo sapiens
tcattaattaaatat

SEQ ID NO: 85868 - DNA, 15 bp, Homo sapiens
cattaattaaatatg

SEQ ID NO: 85869 - DNA, 15 bp, Homo sapiens
attaattaaatatgt

SEQ ID NO: 85870 - DNA, 15 bp, Homo sapiens
ttaattaaatatgtc

SEQ ID NO: 85871 - DNA, 15 bp, Homo sapiens
taattaaatatgtca

SEQ ID NO: 85872 - DNA, 15 bp, Homo sapiens
aattaaatatgtcat

SEQ ID NO: 85873 - DNA, 15 bp, Homo sapiens
attaaatatgtcatt

SEQ ID NO: 85874 - DNA, 15 bp, Homo sapiens
ttaaatatgtcattt

SEQ ID NO: 85875 - DNA, 15 bp, Homo sapiens
taaatatgtcatttc

SEQ ID NO: 85876 - DNA, 15 bp, Homo sapiens
aaatatgtcatttca

SEQ ID NO: 85877 - DNA, 15 bp, Homo sapiens
aatatgtcatttcat

SEQ ID NO: 85878 - DNA, 15 bp, Homo sapiens
atatgtcatttcatt

SEQ ID NO: 85879 - DNA, 15 bp, Homo sapiens
tatgtcatttcattt

SEQ ID NO: 85880 - DNA, 15 bp, Homo sapiens
atgtcatttcatttc

SEQ ID NO: 85881 - DNA, 15 bp, Homo sapiens
tgtcatttcatttct

SEQ ID NO: 85882 - DNA, 15 bp, Homo sapiens
gtcatttcatttctt

SEQ ID NO: 85883 - DNA, 15 bp, Homo sapiens
tcatttcatttcttt

SEQ ID NO: 85884 - DNA, 15 bp, Homo sapiens
catttcatttctttt

SEQ ID NO: 85885 - DNA, 15 bp, Homo sapiens
atttcatttcttttt

SEQ ID NO: 85886 - DNA, 15 bp, Homo sapiens
tttcatttctttttc

SEQ ID NO: 85887 - DNA, 15 bp, Homo sapiens
ttcatttctttttct

SEQ ID NO: 85888 - DNA, 15 bp, Homo sapiens
tcatttctttttctt

SEQ ID NO: 85889 - DNA, 15 bp, Homo sapiens
catttctttttcttt

SEQ ID NO: 85890 - DNA, 15 bp, Homo sapiens
atttctttttctttt

SEQ ID NO: 85891 - DNA, 15 bp, Homo sapiens
tttctttttcttttc

SEQ ID NO: 85892 - DNA, 15 bp, Homo sapiens
ttctttttcttttct

SEQ ID NO: 85893 - DNA, 15 bp, Homo sapiens
tctttttcttttctt

SEQ ID NO: 85894 - DNA, 15 bp, Homo sapiens
tttttcttttctttt

SEQ ID NO: 85895 - DNA, 15 bp, Homo sapiens
ttttcttttcttttt

SEQ ID NO: 85896 - DNA, 15 bp, Homo sapiens
tcttttttttttttt

SEQ ID NO: 85897 - DNA, 15 bp, Homo sapiens
tttttttttttttag

SEQ ID NO: 85898 - DNA, 15 bp, Homo sapiens
ttttttttttttagg

SEQ ID NO: 85899 - DNA, 15 bp, Homo sapiens
tttttttttttagga

SEQ ID NO: 85900 - DNA, 15 bp, Homo sapiens
ttttttttttaggac

SEQ ID NO: 85901 - DNA, 15 bp, Homo sapiens
tttttttttaggaca

SEQ ID NO: 85902 - DNA, 15 bp, Homo sapiens
ttttttttaggacaa

SEQ ID NO: 85903 - DNA, 15 bp, Homo sapiens
tttttttaggacaaa

SEQ ID NO: 85904 - DNA, 15 bp, Homo sapiens
ttttttaggacaaaa

SEQ ID NO: 85905 - DNA, 15 bp, Homo sapiens
tttttaggacaaaat

SEQ ID NO: 85906 - DNA, 15 bp, Homo sapiens
ttttaggacaaaatg

SEQ ID NO: 85907 - DNA, 15 bp, Homo sapiens
tttaggacaaaatgt

SEQ ID NO: 85908 - DNA, 15 bp, Homo sapiens
ttaggacaaaatgtt

SEQ ID NO: 85909 - DNA, 15 bp, Homo sapiens
taggacaaaatgttt

SEQ ID NO: 85910 - DNA, 15 bp, Homo sapiens
aggacaaaatgtttc

SEQ ID NO: 85911 - DNA, 15 bp, Homo sapiens
ggacaaaatgtttca

SEQ ID NO: 85912 - DNA, 15 bp, Homo sapiens
gacaaaatgtttcac

SEQ ID NO: 85913 - DNA, 15 bp, Homo sapiens
acaaaatgtttcact

SEQ ID NO: 85914 - DNA, 15 bp, Homo sapiens
caaaatgtttcactt

SEQ ID NO: 85915 - DNA, 15 bp, Homo sapiens
aaaatgtttcacttt

SEQ ID NO: 85916 - DNA, 15 bp, Homo sapiens
aaatgtttcactttt

SEQ ID NO: 85917 - DNA, 15 bp, Homo sapiens
aatgtttcacttttg

SEQ ID NO: 85918 - DNA, 15 bp, Homo sapiens
atgtttcacttttgg

SEQ ID NO: 85919 - DNA, 15 bp, Homo sapiens
tgtttcacttttggg

SEQ ID NO: 85920 - DNA, 15 bp, Homo sapiens
gtttcacttttgggt

SEQ ID NO: 85921 - DNA, 15 bp, Homo sapiens
tttcacttttgggta

SEQ ID NO: 85922 - DNA, 15 bp, Homo sapiens
ttcacttttgggtaa

SEQ ID NO: 85923 - DNA, 15 bp, Homo sapiens
tcacttttgggtaaa

SEQ ID NO: 85924 - DNA, 15 bp, Homo sapiens
cacttttgggtaaat

SEQ ID NO: 85925 - DNA, 15 bp, Homo sapiens
acttttgggtaaata

SEQ ID NO: 85926 - DNA, 15 bp, Homo sapiens
cttttgggtaaatac

SEQ ID NO: 85927 - DNA, 15 bp, Homo sapiens
ttttgggtaaataca

SEQ ID NO: 85928 - DNA, 15 bp, Homo sapiens
tttgggtaaatacat

SEQ ID NO: 85929 - DNA, 15 bp, Homo sapiens
ttgggtaaatacatt

SEQ ID NO: 85930 - DNA, 15 bp, Homo sapiens
tgggtaaatacattc

SEQ ID NO: 85931 - DNA, 15 bp, Homo sapiens
gggtaaatacattct

SEQ ID NO: 85932 - DNA, 15 bp, Homo sapiens
ggtaaatacattctt

SEQ ID NO: 85933 - DNA, 15 bp, Homo sapiens
gtaaatacattcttc

SEQ ID NO: 85934 - DNA, 15 bp, Homo sapiens
taaatacattcttca

SEQ ID NO: 85935 - DNA, 15 bp, Homo sapiens
aaatacattcttcat

SEQ ID NO: 85936 - DNA, 15 bp, Homo sapiens
aatacattcttcata

SEQ ID NO: 85937 - DNA, 15 bp, Homo sapiens
atacattcttcatac

SEQ ID NO: 85938 - DNA, 15 bp, Homo sapiens
tacattcttcatacc

SEQ ID NO: 85939 - DNA, 15 bp, Homo sapiens
acattcttcatacca

SEQ ID NO: 85940 - DNA, 15 bp, Homo sapiens
cattcttcataccag

SEQ ID NO: 85941 - DNA, 15 bp, Homo sapiens
attcttcataccagg

SEQ ID NO: 85942 - DNA, 15 bp, Homo sapiens
ttcttcataccagga

SEQ ID NO: 85943 - DNA, 15 bp, Homo sapiens
tcttcataccaggac

SEQ ID NO: 85944 - DNA, 15 bp, Homo sapiens
cttcataccaggacc

SEQ ID NO: 85945 - DNA, 15 bp, Homo sapiens
ttcataccaggacca

SEQ ID NO: 85946 - DNA, 15 bp, Homo sapiens
tcataccaggaccag

SEQ ID NO: 85947 - DNA, 15 bp, Homo sapiens
cataccaggaccaga

SEQ ID NO: 85948 - DNA, 15 bp, Homo sapiens
ataccaggaccagag

SEQ ID NO: 85949 - DNA, 15 bp, Homo sapiens
taccaggaccagagg

SEQ ID NO: 85950 - DNA, 15 bp, Homo sapiens
accaggaccagagga

SEQ ID NO: 85951 - DNA, 15 bp, Homo sapiens
ccaggaccagaggaa

SEQ ID NO: 85952 - DNA, 15 bp, Homo sapiens
caggaccagaggaaa

SEQ ID NO: 85953 - DNA, 15 bp, Homo sapiens
aggaccagaggaaac

SEQ ID NO: 85954 - DNA, 15 bp, Homo sapiens
ggaccagaggaaacc

SEQ ID NO: 85955 - DNA, 15 bp, Homo sapiens
gaccagaggaaacct

SEQ ID NO: 85956 - DNA, 15 bp, Homo sapiens
accagaggaaacctc

SEQ ID NO: 85957 - DNA, 15 bp, Homo sapiens
ccagaggaaacctca

SEQ ID NO: 85958 - DNA, 15 bp, Homo sapiens
cagaggaaacctcag

SEQ ID NO: 85959 - DNA, 15 bp, Homo sapiens
agaggaaacctcaga

SEQ ID NO: 85960 - DNA, 15 bp, Homo sapiens
gaggaaacctcagaa

SEQ ID NO: 85961 - DNA, 15 bp, Homo sapiens
aggaaacctcagaaa

SEQ ID NO: 85962 - DNA, 15 bp, Homo sapiens
ggaaacctcagaaaa

SEQ ID NO: 85963 - DNA, 15 bp, Homo sapiens
gaaacctcagaaaaa

SEQ ID NO: 85964 - DNA, 15 bp, Homo sapiens
aaacctcagaaaaag

SEQ ID NO: 85965 - DNA, 15 bp, Homo sapiens
aacctcagaaaaagt

SEQ ID NO: 85966 - DNA, 15 bp, Homo sapiens
acctcagaaaaagta

SEQ ID NO: 85967 - DNA, 15 bp, Homo sapiens
cctcagaaaaagtag

SEQ ID NO: 85968 - DNA, 15 bp, Homo sapiens
ctcagaaaaagtaga

SEQ ID NO: 85969 - DNA, 15 bp, Homo sapiens
tcagaaaaagtagaa

SEQ ID NO: 85970 - DNA, 15 bp, Homo sapiens
cagaaaaagtagaaa

SEQ ID NO: 85971 - DNA, 15 bp, Homo sapiens
agaaaaagtagaaaa

SEQ ID NO: 85972 - DNA, 15 bp, Homo sapiens
gaaaaagtagaaaat

SEQ ID NO: 85973 - DNA, 15 bp, Homo sapiens
aaaaagtagaaaatg

SEQ ID NO: 85974 - DNA, 15 bp, Homo sapiens
aaaagtagaaaatgg

SEQ ID NO: 85975 - DNA, 15 bp, Homo sapiens
aaagtagaaaatgga

SEQ ID NO: 85976 - DNA, 15 bp, Homo sapiens
aagtagaaaatggaa

SEQ ID NO: 85977 - DNA, 15 bp, Homo sapiens
agtagaaaatggaag

SEQ ID NO: 85978 - DNA, 15 bp, Homo sapiens
gtagaaaatggaagt

SEQ ID NO: 85979 - DNA, 15 bp, Homo sapiens
tagaaaatggaagtc

SEQ ID NO: 85980 - DNA, 15 bp, Homo sapiens
agaaaatggaagtct

SEQ ID NO: 85981 - DNA, 15 bp, Homo sapiens
gaaaatggaagtcta

SEQ ID NO: 85982 - DNA, 15 bp, Homo sapiens
aaaatggaagtctat

SEQ ID NO: 85983 - DNA, 15 bp, Homo sapiens
aaatggaagtctatg

SEQ ID NO: 85984 - DNA, 15 bp, Homo sapiens
aatggaagtctatgt

SEQ ID NO: 85985 - DNA, 15 bp, Homo sapiens
atggaagtctatgtg

SEQ ID NO: 85986 - DNA, 15 bp, Homo sapiens
tggaagtctatgtga

SEQ ID NO: 85987 - DNA, 15 bp, Homo sapiens
ggaagtctatgtgat

SEQ ID NO: 85988 - DNA, 15 bp, Homo sapiens
gaagtctatgtgatc

SEQ ID NO: 85989 - DNA, 15 bp, Homo sapiens
aagtctatgtgatca

SEQ ID NO: 85990 - DNA, 15 bp, Homo sapiens
agtctatgtgatcaa

SEQ ID NO: 85991 - DNA, 15 bp, Homo sapiens
gtctatgtgatcaag

SEQ ID NO: 85992 - DNA, 15 bp, Homo sapiens
tctatgtgatcaaga

SEQ ID NO: 85993 - DNA, 15 bp, Homo sapiens
ctatgtgatcaagaa

SEQ ID NO: 85994 - DNA, 15 bp, Homo sapiens
tatgtgatcaagaaa

SEQ ID NO: 85995 - DNA, 15 bp, Homo sapiens
atgtgatcaagaaat

SEQ ID NO: 85996 - DNA, 15 bp, Homo sapiens
tgtgatcaagaaatc

SEQ ID NO: 85997 - DNA, 15 bp, Homo sapiens
gtgatcaagaaatcg

SEQ ID NO: 85998 - DNA, 15 bp, Homo sapiens
tgatcaagaaatcga

SEQ ID NO: 85999 - DNA, 15 bp, Homo sapiens
gatcaagaaatcgat

SEQ ID NO: 86000 - DNA, 15 bp, Homo sapiens
atcaagaaatcgata

SEQ ID NO: 86001 - DNA, 15 bp, Homo sapiens
tcaagaaatcgatag

SEQ ID NO: 86002 - DNA, 15 bp, Homo sapiens
caagaaatcgatagc

SEQ ID NO: 86003 - DNA, 15 bp, Homo sapiens
aagaaatcgatagca

SEQ ID NO: 86004 - DNA, 15 bp, Homo sapiens
agaaatcgatagcat

SEQ ID NO: 86005 - DNA, 15 bp, Homo sapiens
gaaatcgatagcatt

SEQ ID NO: 86006 - DNA, 15 bp, Homo sapiens
aaatcgatagcattt

SEQ ID NO: 86007 - DNA, 15 bp, Homo sapiens
aatcgatagcatttg

SEQ ID NO: 86008 - DNA, 15 bp, Homo sapiens
atcgatagcatttgc

SEQ ID NO: 86009 - DNA, 15 bp, Homo sapiens
tcgatagcatttgca

SEQ ID NO: 86010 - DNA, 15 bp, Homo sapiens
cgatagcatttgcag

SEQ ID NO: 86011 - DNA, 15 bp, Homo sapiens
gatagcatttgcagt

SEQ ID NO: 86012 - DNA, 15 bp, Homo sapiens
atagcatttgcagta

SEQ ID NO: 86013 - DNA, 15 bp, Homo sapiens
tagcatttgcagtat

SEQ ID NO: 86014 - DNA, 15 bp, Homo sapiens
agcatttgcagtata

SEQ ID NO: 86015 - DNA, 15 bp, Homo sapiens
gcatttgcagtatag

SEQ ID NO: 86016 - DNA, 15 bp, Homo sapiens
catttgcagtataga

SEQ ID NO: 86017 - DNA, 15 bp, Homo sapiens
atttgcagtatagag

SEQ ID NO: 86018 - DNA, 15 bp, Homo sapiens
tttgcagtatagagc

SEQ ID NO: 86019 - DNA, 15 bp, Homo sapiens
ttgcagtatagagcg

SEQ ID NO: 86020 - DNA, 15 bp, Homo sapiens
tgcagtatagagcgt

SEQ ID NO: 86021 - DNA, 15 bp, Homo sapiens
gcagtatagagcgtg

SEQ ID NO: 86022 - DNA, 15 bp, Homo sapiens
cagtatagagcgtgc

SEQ ID NO: 86023 - DNA, 15 bp, Homo sapiens
agtatagagcgtgca

SEQ ID NO: 86024 - DNA, 15 bp, Homo sapiens
gtatagagcgtgcag

SEQ ID NO: 86025 - DNA, 15 bp, Homo sapiens
tatagagcgtgcaga

SEQ ID NO: 86026 - DNA, 15 bp, Homo sapiens
atagagcgtgcagat

SEQ ID NO: 86027 - DNA, 15 bp, Homo sapiens
tagagcgtgcagata

SEQ ID NO: 86028 - DNA, 15 bp, Homo sapiens
agagcgtgcagataa

SEQ ID NO: 86029 - DNA, 15 bp, Homo sapiens
gagcgtgcagataat

SEQ ID NO: 86030 - DNA, 15 bp, Homo sapiens
agcgtgcagataatg

SEQ ID NO: 86031 - DNA, 15 bp, Homo sapiens
gcgtgcagataatga

SEQ ID NO: 86032 - DNA, 15 bp, Homo sapiens
cgtgcagataatgac

SEQ ID NO: 86033 - DNA, 15 bp, Homo sapiens
gtgcagataatgaca

SEQ ID NO: 86034 - DNA, 15 bp, Homo sapiens
tgcagataatgacaa

SEQ ID NO: 86035 - DNA, 15 bp, Homo sapiens
gcagataatgacaag

SEQ ID NO: 86036 - DNA, 15 bp, Homo sapiens
cagataatgacaagg

SEQ ID NO: 86037 - DNA, 15 bp, Homo sapiens
agataatgacaagga

SEQ ID NO: 86038 - DNA, 15 bp, Homo sapiens
gataatgacaaggaa

SEQ ID NO: 86039 - DNA, 15 bp, Homo sapiens
ataatgacaaggaat

SEQ ID NO: 86040 - DNA, 15 bp, Homo sapiens
taatgacaaggaata

SEQ ID NO: 86041 - DNA, 15 bp, Homo sapiens
aatgacaaggaatat

SEQ ID NO: 86042 - DNA, 15 bp, Homo sapiens
atgacaaggaatatc

SEQ ID NO: 86043 - DNA, 15 bp, Homo sapiens
tgacaaggaatatct

SEQ ID NO: 86044 - DNA, 15 bp, Homo sapiens
gacaaggaatatcta

SEQ ID NO: 86045 - DNA, 15 bp, Homo sapiens
acaaggaatatctag

SEQ ID NO: 86046 - DNA, 15 bp, Homo sapiens
caaggaatatctagt

SEQ ID NO: 86047 - DNA, 15 bp, Homo sapiens
aaggaatatctagta

SEQ ID NO: 86048 - DNA, 15 bp, Homo sapiens
aggaatatctagtac

SEQ ID NO: 86049 - DNA, 15 bp, Homo sapiens
ggaatatctagtact

SEQ ID NO: 86050 - DNA, 15 bp, Homo sapiens
gaatatctagtactt

SEQ ID NO: 86051 - DNA, 15 bp, Homo sapiens
aatatctagtactta

SEQ ID NO: 86052 - DNA, 15 bp, Homo sapiens
atatctagtacttac

SEQ ID NO: 86053 - DNA, 15 bp, Homo sapiens
tatctagtacttact

SEQ ID NO: 86054 - DNA, 15 bp, Homo sapiens
atctagtacttactt

SEQ ID NO: 86055 - DNA, 15 bp, Homo sapiens
tctagtacttacttt

SEQ ID NO: 86056 - DNA, 15 bp, Homo sapiens
ctagtacttacttta

SEQ ID NO: 86057 - DNA, 15 bp, Homo sapiens
tagtacttactttaa

SEQ ID NO: 86058 - DNA, 15 bp, Homo sapiens
agtacttactttaac

SEQ ID NO: 86059 - DNA, 15 bp, Homo sapiens
gtacttactttaaca

SEQ ID NO: 86060 - DNA, 15 bp, Homo sapiens
tacttactttaacaa

SEQ ID NO: 86061 - DNA, 15 bp, Homo sapiens
acttactttaacaaa

SEQ ID NO: 86062 - DNA, 15 bp, Homo sapiens
cttactttaacaaaa

SEQ ID NO: 86063 - DNA, 15 bp, Homo sapiens
ttactttaacaaaaa

SEQ ID NO: 86064 - DNA, 15 bp, Homo sapiens
tactttaacaaaaaa

SEQ ID NO: 86065 - DNA, 15 bp, Homo sapiens
actttaacaaaaaat

SEQ ID NO: 86066 - DNA, 15 bp, Homo sapiens
ctttaacaaaaaatg

SEQ ID NO: 86067 - DNA, 15 bp, Homo sapiens
tttaacaaaaaatga

SEQ ID NO: 86068 - DNA, 15 bp, Homo sapiens
ttaacaaaaaatgat

SEQ ID NO: 86069 - DNA, 15 bp, Homo sapiens
taacaaaaaatgatc

SEQ ID NO: 86070 - DNA, 15 bp, Homo sapiens
aacaaaaaatgatct

SEQ ID NO: 86071 - DNA, 15 bp, Homo sapiens
acaaaaaatgatctt

SEQ ID NO: 86072 - DNA, 15 bp, Homo sapiens
caaaaaatgatcttg

SEQ ID NO: 86073 - DNA, 15 bp, Homo sapiens
aaaaaatgatcttga

SEQ ID NO: 86074 - DNA, 15 bp, Homo sapiens
aaaaatgatcttgac

SEQ ID NO: 86075 - DNA, 15 bp, Homo sapiens
aaaatgatcttgaca

SEQ ID NO: 86076 - DNA, 15 bp, Homo sapiens
aaatgatcttgacaa

SEQ ID NO: 86077 - DNA, 15 bp, Homo sapiens
aatgatcttgacaaa

SEQ ID NO: 86078 - DNA, 15 bp, Homo sapiens
atgatcttgacaaag

SEQ ID NO: 86079 - DNA, 15 bp, Homo sapiens
tgatcttgacaaagc

SEQ ID NO: 86080 - DNA, 15 bp, Homo sapiens
gatcttgacaaagca

SEQ ID NO: 86081 - DNA, 15 bp, Homo sapiens
atcttgacaaagcaa

SEQ ID NO: 86082 - DNA, 15 bp, Homo sapiens
tcttgacaaagcaaa

SEQ ID NO: 86083 - DNA, 15 bp, Homo sapiens
cttgacaaagcaaat

SEQ ID NO: 86084 - DNA, 15 bp, Homo sapiens
ttgacaaagcaaata

SEQ ID NO: 86085 - DNA, 15 bp, Homo sapiens
tgacaaagcaaataa

SEQ ID NO: 86086 - DNA, 15 bp, Homo sapiens
gacaaagcaaataaa

SEQ ID NO: 86087 - DNA, 15 bp, Homo sapiens
acaaagcaaataaag

SEQ ID NO: 86088 - DNA, 15 bp, Homo sapiens
caaagcaaataaaga

SEQ ID NO: 86089 - DNA, 15 bp, Homo sapiens
aaagcaaataaagac

SEQ ID NO: 86090 - DNA, 15 bp, Homo sapiens
aagcaaataaagaca

SEQ ID NO: 86091 - DNA, 15 bp, Homo sapiens
agcaaataaagacaa

SEQ ID NO: 86092 - DNA, 15 bp, Homo sapiens
gcaaataaagacaaa

SEQ ID NO: 86093 - DNA, 15 bp, Homo sapiens
caaataaagacaaag

SEQ ID NO: 86094 - DNA, 15 bp, Homo sapiens
aaataaagacaaagc

SEQ ID NO: 86095 - DNA, 15 bp, Homo sapiens
aataaagacaaagcc

SEQ ID NO: 86096 - DNA, 15 bp, Homo sapiens
ataaagacaaagcca

SEQ ID NO: 86097 - DNA, 15 bp, Homo sapiens
taaagacaaagccaa

SEQ ID NO: 86098 - DNA, 15 bp, Homo sapiens
aaagacaaagccaac

SEQ ID NO: 86099 - DNA, 15 bp, Homo sapiens
aagacaaagccaacc

SEQ ID NO: 86100 - DNA, 15 bp, Homo sapiens
agacaaagccaaccg

SEQ ID NO: 86101 - DNA, 15 bp, Homo sapiens
gacaaagccaaccga

SEQ ID NO: 86102 - DNA, 15 bp, Homo sapiens
acaaagccaaccgat

SEQ ID NO: 86103 - DNA, 15 bp, Homo sapiens
caaagccaaccgata

SEQ ID NO: 86104 - DNA, 15 bp, Homo sapiens
aaagccaaccgatac

SEQ ID NO: 86105 - DNA, 15 bp, Homo sapiens
aagccaaccgatact

SEQ ID NO: 86106 - DNA, 15 bp, Homo sapiens
agccaaccgatactt

SEQ ID NO: 86107 - DNA, 15 bp, Homo sapiens
gccaaccgatacttt

SEQ ID NO: 86108 - DNA, 15 bp, Homo sapiens
ccaaccgatactttt

SEQ ID NO: 86109 - DNA, 15 bp, Homo sapiens
caaccgatacttttc

SEQ ID NO: 86110 - DNA, 15 bp, Homo sapiens
aaccgatacttttct

SEQ ID NO: 86111 - DNA, 15 bp, Homo sapiens
accgatacttttctc

SEQ ID NO: 86112 - DNA, 15 bp, Homo sapiens
ccgatacttttctcc

SEQ ID NO: 86113 - DNA, 15 bp, Homo sapiens
cgatacttttctcca

SEQ ID NO: 86114 - DNA, 15 bp, Homo sapiens
gatacttttctccaa

SEQ ID NO: 86115 - DNA, 15 bp, Homo sapiens
atacttttctccaaa

SEQ ID NO: 86116 - DNA, 15 bp, Homo sapiens
tacttttctccaaat

SEQ ID NO: 86117 - DNA, 15 bp, Homo sapiens
acttttctccaaatt

SEQ ID NO: 86118 - DNA, 15 bp, Homo sapiens
cttttctccaaattt

SEQ ID NO: 86119 - DNA, 15 bp, Homo sapiens
ttttctccaaatttt

SEQ ID NO: 86120 - DNA, 15 bp, Homo sapiens
tttctccaaatttta

SEQ ID NO: 86121 - DNA, 15 bp, Homo sapiens
ttctccaaattttaa

SEQ ID NO: 86122 - DNA, 15 bp, Homo sapiens
tctccaaattttaag

SEQ ID NO: 86123 - DNA, 15 bp, Homo sapiens
ctccaaattttaagg

SEQ ID NO: 86124 - DNA, 15 bp, Homo sapiens
tccaaattttaaggt

SEQ ID NO: 86125 - DNA, 15 bp, Homo sapiens
ccaaattttaaggtc

SEQ ID NO: 86126 - DNA, 15 bp, Homo sapiens
caaattttaaggtca

SEQ ID NO: 86127 - DNA, 15 bp, Homo sapiens
aaattttaaggtcag

SEQ ID NO: 86128 - DNA, 15 bp, Homo sapiens
aattttaaggtcagt

SEQ ID NO: 86129 - DNA, 15 bp, Homo sapiens
attttaaggtcagtt

SEQ ID NO: 86130 - DNA, 15 bp, Homo sapiens
ttttaaggtcagtta

SEQ ID NO: 86131 - DNA, 15 bp, Homo sapiens
tttaaggtcagttaa

SEQ ID NO: 86132 - DNA, 15 bp, Homo sapiens
ttaaggtcagttaaa

SEQ ID NO: 86133 - DNA, 15 bp, Homo sapiens
taaggtcagttaaat

SEQ ID NO: 86134 - DNA, 15 bp, Homo sapiens
aaggtcagttaaatt

SEQ ID NO: 86135 - DNA, 15 bp, Homo sapiens
aggtcagttaaatta

SEQ ID NO: 86136 - DNA, 15 bp, Homo sapiens
ggtcagttaaattaa

SEQ ID NO: 86137 - DNA, 15 bp, Homo sapiens
gtcagttaaattaaa

SEQ ID NO: 86138 - DNA, 15 bp, Homo sapiens
tcagttaaattaaac

SEQ ID NO: 86139 - DNA, 15 bp, Homo sapiens
cagttaaattaaaca

SEQ ID NO: 86140 - DNA, 15 bp, Homo sapiens
agttaaattaaacat

SEQ ID NO: 86141 - DNA, 15 bp, Homo sapiens
gttaaattaaacatt

SEQ ID NO: 86142 - DNA, 15 bp, Homo sapiens
ttaaattaaacattt

SEQ ID NO: 86143 - DNA, 15 bp, Homo sapiens
taaattaaacatttt

SEQ ID NO: 86144 - DNA, 15 bp, Homo sapiens
aaattaaacattttg

SEQ ID NO: 86145 - DNA, 15 bp, Homo sapiens
aattaaacattttgt

SEQ ID NO: 86146 - DNA, 15 bp, Homo sapiens
attaaacattttgtg

SEQ ID NO: 86147 - DNA, 15 bp, Homo sapiens
ttaaacattttgtgg

SEQ ID NO: 86148 - DNA, 15 bp, Homo sapiens
taaacattttgtggg

SEQ ID NO: 86149 - DNA, 15 bp, Homo sapiens
aaacattttgtgggg

SEQ ID NO: 86150 - DNA, 15 bp, Homo sapiens
aacattttgtggggg

SEQ ID NO: 86151 - DNA, 15 bp, Homo sapiens
acattttgtgggggt

SEQ ID NO: 86152 - DNA, 15 bp, Homo sapiens
cattttgtgggggtt

SEQ ID NO: 86153 - DNA, 15 bp, Homo sapiens
attttgtgggggttg

SEQ ID NO: 86154 - DNA, 15 bp, Homo sapiens
ttttgtgggggttgt

SEQ ID NO: 86155 - DNA, 15 bp, Homo sapiens
tttgtgggggttgtt

SEQ ID NO: 86156 - DNA, 15 bp, Homo sapiens
ttgtgggggttgttg

SEQ ID NO: 86157 - DNA, 15 bp, Homo sapiens
tgtgggggttgttga

SEQ ID NO: 86158 - DNA, 15 bp, Homo sapiens
gtgggggttgttgac

SEQ ID NO: 86159 - DNA, 15 bp, Homo sapiens
tgggggttgttgact

SEQ ID NO: 86160 - DNA, 15 bp, Homo sapiens
gggggttgttgactt

SEQ ID NO: 86161 - DNA, 15 bp, Homo sapiens
ggggttgttgacttg

SEQ ID NO: 86162 - DNA, 15 bp, Homo sapiens
gggttgttgacttgt

SEQ ID NO: 86163 - DNA, 15 bp, Homo sapiens
ggttgttgacttgta

SEQ ID NO: 86164 - DNA, 15 bp, Homo sapiens
gttgttgacttgtat

SEQ ID NO: 86165 - DNA, 15 bp, Homo sapiens
ttgttgacttgtatg

SEQ ID NO: 86166 - DNA, 15 bp, Homo sapiens
tgttgacttgtatgt

SEQ ID NO: 86167 - DNA, 15 bp, Homo sapiens
gttgacttgtatgta

SEQ ID NO: 86168 - DNA, 15 bp, Homo sapiens
ttgacttgtatgtat

SEQ ID NO: 86169 - DNA, 15 bp, Homo sapiens
tgacttgtatgtatg

SEQ ID NO: 86170 - DNA, 15 bp, Homo sapiens
gacttgtatgtatgt

SEQ ID NO: 86171 - DNA, 15 bp, Homo sapiens
acttgtatgtatgtg

SEQ ID NO: 86172 - DNA, 15 bp, Homo sapiens
cttgtatgtatgtga

SEQ ID NO: 86173 - DNA, 15 bp, Homo sapiens
ttgtatgtatgtgat

SEQ ID NO: 86174 - DNA, 15 bp, Homo sapiens
tgtatgtatgtgatg

SEQ ID NO: 86175 - DNA, 15 bp, Homo sapiens
gtatgtatgtgatgt

SEQ ID NO: 86176 - DNA, 15 bp, Homo sapiens
tatgtatgtgatgtg

SEQ ID NO: 86177 - DNA, 15 bp, Homo sapiens
atgtatgtgatgtgt

SEQ ID NO: 86178 - DNA, 15 bp, Homo sapiens
tgtatgtgatgtgtg

SEQ ID NO: 86179 - DNA, 15 bp, Homo sapiens
gtatgtgatgtgtgt

SEQ ID NO: 86180 - DNA, 15 bp, Homo sapiens
tatgtgatgtgtgtt

SEQ ID NO: 86181 - DNA, 15 bp, Homo sapiens
atgtgatgtgtgttt

SEQ ID NO: 86182 - DNA, 15 bp, Homo sapiens
tgtgatgtgtgttta

SEQ ID NO: 86183 - DNA, 15 bp, Homo sapiens
gtgatgtgtgtttaa

SEQ ID NO: 86184 - DNA, 15 bp, Homo sapiens
tgatgtgtgtttaat

SEQ ID NO: 86185 - DNA, 15 bp, Homo sapiens
gatgtgtgtttaatt

SEQ ID NO: 86186 - DNA, 15 bp, Homo sapiens
atgtgtgtttaattc

SEQ ID NO: 86187 - DNA, 15 bp, Homo sapiens
tgtgtgtttaattct

SEQ ID NO: 86188 - DNA, 15 bp, Homo sapiens
gtgtgtttaattcta

SEQ ID NO: 86189 - DNA, 15 bp, Homo sapiens
tgtgtttaattctag

SEQ ID NO: 86190 - DNA, 15 bp, Homo sapiens
gtgtttaattctagg

SEQ ID NO: 86191 - DNA, 15 bp, Homo sapiens
tgtttaattctagga

SEQ ID NO: 86192 - DNA, 15 bp, Homo sapiens
gtttaattctaggag

SEQ ID NO: 86193 - DNA, 15 bp, Homo sapiens
tttaattctaggagt

SEQ ID NO: 86194 - DNA, 15 bp, Homo sapiens
ttaattctaggagta

SEQ ID NO: 86195 - DNA, 15 bp, Homo sapiens
taattctaggagtac

SEQ ID NO: 86196 - DNA, 15 bp, Homo sapiens
aattctaggagtaca

SEQ ID NO: 86197 - DNA, 15 bp, Homo sapiens
attctaggagtacag

SEQ ID NO: 86198 - DNA, 15 bp, Homo sapiens
ttctaggagtacagc

SEQ ID NO: 86199 - DNA, 15 bp, Homo sapiens
tctaggagtacagct

SEQ ID NO: 86200 - DNA, 15 bp, Homo sapiens
ctaggagtacagctg

SEQ ID NO: 86201 - DNA, 15 bp, Homo sapiens
taggagtacagctga

SEQ ID NO: 86202 - DNA, 15 bp, Homo sapiens
aggagtacagctgat

SEQ ID NO: 86203 - DNA, 15 bp, Homo sapiens
ggagtacagctgatg

SEQ ID NO: 86204 - DNA, 15 bp, Homo sapiens
gagtacagctgatga

SEQ ID NO: 86205 - DNA, 15 bp, Homo sapiens
agtacagctgatgaa

SEQ ID NO: 86206 - DNA, 15 bp, Homo sapiens
gtacagctgatgaag

SEQ ID NO: 86207 - DNA, 15 bp, Homo sapiens
tacagctgatgaaga

SEQ ID NO: 86208 - DNA, 15 bp, Homo sapiens
acagctgatgaagaa

SEQ ID NO: 86209 - DNA, 15 bp, Homo sapiens
cagctgatgaagaac

SEQ ID NO: 86210 - DNA, 15 bp, Homo sapiens
agctgatgaagaact

SEQ ID NO: 86211 - DNA, 15 bp, Homo sapiens
gctgatgaagaactt

SEQ ID NO: 86212 - DNA, 15 bp, Homo sapiens
ctgatgaagaacttg

SEQ ID NO: 86213 - DNA, 15 bp, Homo sapiens
tgatgaagaacttgc

SEQ ID NO: 86214 - DNA, 15 bp, Homo sapiens
gatgaagaacttgct

SEQ ID NO: 86215 - DNA, 15 bp, Homo sapiens
atgaagaacttgctt

SEQ ID NO: 86216 - DNA, 15 bp, Homo sapiens
tgaagaacttgcttg

SEQ ID NO: 86217 - DNA, 15 bp, Homo sapiens
gaagaacttgcttga

SEQ ID NO: 86218 - DNA, 15 bp, Homo sapiens
aagaacttgcttgac

SEQ ID NO: 86219 - DNA, 15 bp, Homo sapiens
agaacttgcttgaca

SEQ ID NO: 86220 - DNA, 15 bp, Homo sapiens
gaacttgcttgacaa

SEQ ID NO: 86221 - DNA, 15 bp, Homo sapiens
aacttgcttgacaag

SEQ ID NO: 86222 - DNA, 15 bp, Homo sapiens
acttgcttgacaagt

SEQ ID NO: 86223 - DNA, 15 bp, Homo sapiens
cttgcttgacaagtt

SEQ ID NO: 86224 - DNA, 15 bp, Homo sapiens
ttgcttgacaagttt

SEQ ID NO: 86225 - DNA, 15 bp, Homo sapiens
tgcttgacaagtttt

SEQ ID NO: 86226 - DNA, 15 bp, Homo sapiens
gcttgacaagttttt

SEQ ID NO: 86227 - DNA, 15 bp, Homo sapiens
cttgacaagttttta

SEQ ID NO: 86228 - DNA, 15 bp, Homo sapiens
ttgacaagtttttaa

SEQ ID NO: 86229 - DNA, 15 bp, Homo sapiens
tgacaagtttttaac

SEQ ID NO: 86230 - DNA, 15 bp, Homo sapiens
gacaagtttttaact

SEQ ID NO: 86231 - DNA, 15 bp, Homo sapiens
acaagtttttaactt

SEQ ID NO: 86232 - DNA, 15 bp, Homo sapiens
caagtttttaactta

SEQ ID NO: 86233 - DNA, 15 bp, Homo sapiens
aagtttttaacttat

SEQ ID NO: 86234 - DNA, 15 bp, Homo sapiens
agtttttaacttatg

SEQ ID NO: 86235 - DNA, 15 bp, Homo sapiens
gtttttaacttatgt

SEQ ID NO: 86236 - DNA, 15 bp, Homo sapiens
tttttaacttatgta

SEQ ID NO: 86237 - DNA, 15 bp, Homo sapiens
ttttaacttatgtat

SEQ ID NO: 86238 - DNA, 15 bp, Homo sapiens
tttaacttatgtatt

SEQ ID NO: 86239 - DNA, 15 bp, Homo sapiens
ttaacttatgtatta

SEQ ID NO: 86240 - DNA, 15 bp, Homo sapiens
taacttatgtattat

SEQ ID NO: 86241 - DNA, 15 bp, Homo sapiens
aacttatgtattatt

SEQ ID NO: 86242 - DNA, 15 bp, Homo sapiens
acttatgtattattt

SEQ ID NO: 86243 - DNA, 15 bp, Homo sapiens
cttatgtattatttc

SEQ ID NO: 86244 - DNA, 15 bp, Homo sapiens
ttatgtattatttcg

SEQ ID NO: 86245 - DNA, 15 bp, Homo sapiens
tatgtattatttcga

SEQ ID NO: 86246 - DNA, 15 bp, Homo sapiens
atgtattatttcgaa

SEQ ID NO: 86247 - DNA, 15 bp, Homo sapiens
tgtattatttcgaag

SEQ ID NO: 86248 - DNA, 15 bp, Homo sapiens
gtattatttcgaagc

SEQ ID NO: 86249 - DNA, 15 bp, Homo sapiens
tattatttcgaagca

SEQ ID NO: 86250 - DNA, 15 bp, Homo sapiens
attatttcgaagcag

SEQ ID NO: 86251 - DNA, 15 bp, Homo sapiens
ttatttcgaagcagt

SEQ ID NO: 86252 - DNA, 15 bp, Homo sapiens
tatttcgaagcagtg

SEQ ID NO: 86253 - DNA, 15 bp, Homo sapiens
atttcgaagcagtgt

SEQ ID NO: 86254 - DNA, 15 bp, Homo sapiens
tttcgaagcagtgtt

SEQ ID NO: 86255 - DNA, 15 bp, Homo sapiens
ttcgaagcagtgttt

SEQ ID NO: 86256 - DNA, 15 bp, Homo sapiens
tcgaagcagtgttta

SEQ ID NO: 86257 - DNA, 15 bp, Homo sapiens
cgaagcagtgtttac

SEQ ID NO: 86258 - DNA, 15 bp, Homo sapiens
gaagcagtgtttacg

SEQ ID NO: 86259 - DNA, 15 bp, Homo sapiens
aagcagtgtttacgt

SEQ ID NO: 86260 - DNA, 15 bp, Homo sapiens
agcagtgtttacgta

SEQ ID NO: 86261 - DNA, 15 bp, Homo sapiens
gcagtgtttacgtag

SEQ ID NO: 86262 - DNA, 15 bp, Homo sapiens
cagtgtttacgtagc

SEQ ID NO: 86263 - DNA, 15 bp, Homo sapiens
agtgtttacgtagca

SEQ ID NO: 86264 - DNA, 15 bp, Homo sapiens
gtgtttacgtagcag

SEQ ID NO: 86265 - DNA, 15 bp, Homo sapiens
tgtttacgtagcagt

SEQ ID NO: 86266 - DNA, 15 bp, Homo sapiens
gtttacgtagcagta

SEQ ID NO: 86267 - DNA, 15 bp, Homo sapiens
tttacgtagcagtaa

SEQ ID NO: 86268 - DNA, 15 bp, Homo sapiens
ttacgtagcagtaac

SEQ ID NO: 86269 - DNA, 15 bp, Homo sapiens
tacgtagcagtaaca

SEQ ID NO: 86270 - DNA, 15 bp, Homo sapiens
acgtagcagtaacat

SEQ ID NO: 86271 - DNA, 15 bp, Homo sapiens
cgtagcagtaacatg

SEQ ID NO: 86272 - DNA, 15 bp, Homo sapiens
gtagcagtaacatga

SEQ ID NO: 86273 - DNA, 15 bp, Homo sapiens
tagcagtaacatgaa

SEQ ID NO: 86274 - DNA, 15 bp, Homo sapiens
agcagtaacatgaaa

SEQ ID NO: 86275 - DNA, 15 bp, Homo sapiens
gcagtaacatgaaag

SEQ ID NO: 86276 - DNA, 15 bp, Homo sapiens
cagtaacatgaaagt

SEQ ID NO: 86277 - DNA, 15 bp, Homo sapiens
agtaacatgaaagtt

SEQ ID NO: 86278 - DNA, 15 bp, Homo sapiens
gtaacatgaaagttt

SEQ ID NO: 86279 - DNA, 15 bp, Homo sapiens
taacatgaaagtttc

SEQ ID NO: 86280 - DNA, 15 bp, Homo sapiens
aacatgaaagtttct

SEQ ID NO: 86281 - DNA, 15 bp, Homo sapiens
acatgaaagtttcta

SEQ ID NO: 86282 - DNA, 15 bp, Homo sapiens
catgaaagtttctaa

SEQ ID NO: 86283 - DNA, 15 bp, Homo sapiens
atgaaagtttctaat

SEQ ID NO: 86284 - DNA, 15 bp, Homo sapiens
tgaaagtttctaata

SEQ ID NO: 86285 - DNA, 15 bp, Homo sapiens
gaaagtttctaataa

SEQ ID NO: 86286 - DNA, 15 bp, Homo sapiens
aaagtttctaataaa

SEQ ID NO: 86287 - DNA, 15 bp, Homo sapiens
aagtttctaataaaa

SEQ ID NO: 86288 - DNA, 15 bp, Homo sapiens
agtttctaataaaat

SEQ ID NO: 86289 - DNA, 15 bp, Homo sapiens
gtttctaataaaata

SEQ ID NO: 86290 - DNA, 15 bp, Homo sapiens
tttctaataaaatac

SEQ ID NO: 86291 - DNA, 15 bp, Homo sapiens
ttctaataaaatacc

SEQ ID NO: 86292 - DNA, 15 bp, Homo sapiens
tctaataaaataccc

SEQ ID NO: 86293 - DNA, 15 bp, Homo sapiens
ctaataaaataccca

SEQ ID NO: 86294 - DNA, 15 bp, Homo sapiens
taataaaatacccaa

SEQ ID NO: 86295 - DNA, 15 bp, Homo sapiens
aataaaatacccaat

SEQ ID NO: 86296 - DNA, 15 bp, Homo sapiens
ataaaatacccaatg

SEQ ID NO: 86297 - DNA, 15 bp, Homo sapiens
taaaatacccaatgt

SEQ ID NO: 86298 - DNA, 15 bp, Homo sapiens
aaaatacccaatgta

SEQ ID NO: 86299 - DNA, 15 bp, Homo sapiens
aaatacccaatgtac

SEQ ID NO: 86300 - DNA, 15 bp, Homo sapiens
aatacccaatgtaca

SEQ ID NO: 86301 - DNA, 15 bp, Homo sapiens
atacccaatgtacac

SEQ ID NO: 86302 - DNA, 15 bp, Homo sapiens
tacccaatgtacaca

SEQ ID NO: 86303 - DNA, 15 bp, Homo sapiens
acccaatgtacacag

SEQ ID NO: 86304 - DNA, 15 bp, Homo sapiens
cccaatgtacacagc

SEQ ID NO: 86305 - DNA, 15 bp, Homo sapiens
ccaatgtacacagcg

SEQ ID NO: 86306 - DNA, 15 bp, Homo sapiens
caatgtacacagcgt

SEQ ID NO: 86307 - DNA, 15 bp, Homo sapiens
aatgtacacagcgtc

SEQ ID NO: 86308 - DNA, 15 bp, Homo sapiens
atgtacacagcgtca

SEQ ID NO: 86309 - DNA, 15 bp, Homo sapiens
tgtacacagcgtcaa

SEQ ID NO: 86310 - DNA, 15 bp, Homo sapiens
gtacacagcgtcaaa

SEQ ID NO: 86311 - DNA, 15 bp, Homo sapiens
tacacagcgtcaaaa

SEQ ID NO: 86312 - DNA, 15 bp, Homo sapiens
acacagcgtcaaaaa

SEQ ID NO: 86313 - DNA, 15 bp, Homo sapiens
cacagcgtcaaaaaa

SEQ ID NO: 86314 - DNA, 15 bp, Homo sapiens
acagcgtcaaaaaag

SEQ ID NO: 86315 - DNA, 15 bp, Homo sapiens
cagcgtcaaaaaagc

SEQ ID NO: 86316 - DNA, 15 bp, Homo sapiens
agcgtcaaaaaagct

SEQ ID NO: 86317 - DNA, 15 bp, Homo sapiens
gcgtcaaaaaagctg

SEQ ID NO: 86318 - DNA, 15 bp, Homo sapiens
cgtcaaaaaagctgc

SEQ ID NO: 86319 - DNA, 15 bp, Homo sapiens
gtcaaaaaagctgca

SEQ ID NO: 86320 - DNA, 15 bp, Homo sapiens
tcaaaaaagctgcat

SEQ ID NO: 86321 - DNA, 15 bp, Homo sapiens
caaaaaagctgcatt

SEQ ID NO: 86322 - DNA, 15 bp, Homo sapiens
aaaaaagctgcattt

SEQ ID NO: 86323 - DNA, 15 bp, Homo sapiens
aaaaagctgcatttt

SEQ ID NO: 86324 - DNA, 15 bp, Homo sapiens
aaaagctgcattttt

SEQ ID NO: 86325 - DNA, 15 bp, Homo sapiens
aaagctgcatttttc

SEQ ID NO: 86326 - DNA, 15 bp, Homo sapiens
aagctgcatttttcc

SEQ ID NO: 86327 - DNA, 15 bp, Homo sapiens
agctgcatttttcct

SEQ ID NO: 86328 - DNA, 15 bp, Homo sapiens
gctgcatttttcctt

SEQ ID NO: 86329 - DNA, 15 bp, Homo sapiens
ctgcatttttccttt

SEQ ID NO: 86330 - DNA, 15 bp, Homo sapiens
tgcatttttcctttt

SEQ ID NO: 86331 - DNA, 15 bp, Homo sapiens
gcatttttccttttc

SEQ ID NO: 86332 - DNA, 15 bp, Homo sapiens
catttttccttttcc

SEQ ID NO: 86333 - DNA, 15 bp, Homo sapiens
atttttccttttcct

SEQ ID NO: 86334 - DNA, 15 bp, Homo sapiens
tttttccttttccta

SEQ ID NO: 86335 - DNA, 15 bp, Homo sapiens
ttttccttttcctaa

SEQ ID NO: 86336 - DNA, 15 bp, Homo sapiens
tttccttttcctaat

SEQ ID NO: 86337 - DNA, 15 bp, Homo sapiens
ttccttttcctaatt

SEQ ID NO: 86338 - DNA, 15 bp, Homo sapiens
tccttttcctaattc

SEQ ID NO: 86339 - DNA, 15 bp, Homo sapiens
ccttttcctaattct

SEQ ID NO: 86340 - DNA, 15 bp, Homo sapiens
cttttcctaattctt

SEQ ID NO: 86341 - DNA, 15 bp, Homo sapiens
ttttcctaattcttc

SEQ ID NO: 86342 - DNA, 15 bp, Homo sapiens
tttcctaattcttcg

SEQ ID NO: 86343 - DNA, 15 bp, Homo sapiens
ttcctaattcttcgt

SEQ ID NO: 86344 - DNA, 15 bp, Homo sapiens
tcctaattcttcgtt

SEQ ID NO: 86345 - DNA, 15 bp, Homo sapiens
cctaattcttcgttg

SEQ ID NO: 86346 - DNA, 15 bp, Homo sapiens
ctaattcttcgttgt

SEQ ID NO: 86347 - DNA, 15 bp, Homo sapiens
taattcttcgttgtt

SEQ ID NO: 86348 - DNA, 15 bp, Homo sapiens
aattcttcgttgttt

SEQ ID NO: 86349 - DNA, 15 bp, Homo sapiens
attcttcgttgtttg

SEQ ID NO: 86350 - DNA, 15 bp, Homo sapiens
ttcttcgttgtttgc

SEQ ID NO: 86351 - DNA, 15 bp, Homo sapiens
tcttcgttgtttgct

SEQ ID NO: 86352 - DNA, 15 bp, Homo sapiens
cttcgttgtttgctg

SEQ ID NO: 86353 - DNA, 15 bp, Homo sapiens
ttcgttgtttgctga

SEQ ID NO: 86354 - DNA, 15 bp, Homo sapiens
tcgttgtttgctgaa

SEQ ID NO: 86355 - DNA, 15 bp, Homo sapiens
cgttgtttgctgaaa

SEQ ID NO: 86356 - DNA, 15 bp, Homo sapiens
ttgtttgctgaaatc

SEQ ID NO: 86357 - DNA, 15 bp, Homo sapiens
tgtttgctgaaatct

SEQ ID NO: 86358 - DNA, 15 bp, Homo sapiens
gtttgctgaaatctg

SEQ ID NO: 86359 - DNA, 15 bp, Homo sapiens
tttgctgaaatctgg

SEQ ID NO: 86360 - DNA, 15 bp, Homo sapiens
ttgctgaaatctggg

SEQ ID NO: 86361 - DNA, 15 bp, Homo sapiens
tgctgaaatctgggg

SEQ ID NO: 86362 - DNA, 15 bp, Homo sapiens
gctgaaatctggggc

SEQ ID NO: 86363 - DNA, 15 bp, Homo sapiens
ctgaaatctggggca

SEQ ID NO: 86364 - DNA, 15 bp, Homo sapiens
tgaaatctggggcaa

SEQ ID NO: 86365 - DNA, 15 bp, Homo sapiens
gaaatctggggcaaa

SEQ ID NO: 86366 - DNA, 15 bp, Homo sapiens
aaatctggggcaaag

SEQ ID NO: 86367 - DNA, 15 bp, Homo sapiens
aatctggggcaaagg

SEQ ID NO: 86368 - DNA, 15 bp, Homo sapiens
atctggggcaaaggt

SEQ ID NO: 86369 - DNA, 15 bp, Homo sapiens
tctggggcaaaggtg

SEQ ID NO: 86370 - DNA, 15 bp, Homo sapiens
ctggggcaaaggtgc

SEQ ID NO: 86371 - DNA, 15 bp, Homo sapiens
tggggcaaaggtgcg

SEQ ID NO: 86372 - DNA, 15 bp, Homo sapiens
ggggcaaaggtgcgg

SEQ ID NO: 86373 - DNA, 15 bp, Homo sapiens
gggcaaaggtgcggg

SEQ ID NO: 86374 - DNA, 15 bp, Homo sapiens
ggcaaaggtgcggga

SEQ ID NO: 86375 - DNA, 15 bp, Homo sapiens
gcaaaggtgcgggag

SEQ ID NO: 86376 - DNA, 15 bp, Homo sapiens
caaaggtgcgggagg

SEQ ID NO: 86377 - DNA, 15 bp, Homo sapiens
aaaggtgcgggaggg

SEQ ID NO: 86378 - DNA, 15 bp, Homo sapiens
aaggtgcgggagggg

SEQ ID NO: 86379 - DNA, 15 bp, Homo sapiens
aggtgcgggaggggg

SEQ ID NO: 86380 - DNA, 15 bp, Homo sapiens
ggtgcgggagggggc

SEQ ID NO: 86381 - DNA, 15 bp, Homo sapiens
gtgcgggagggggct

SEQ ID NO: 86382 - DNA, 15 bp, Homo sapiens
tgcgggagggggcta

SEQ ID NO: 86383 - DNA, 15 bp, Homo sapiens
gcgggagggggctaa

SEQ ID NO: 86384 - DNA, 15 bp, Homo sapiens
cgggagggggctaaa

SEQ ID NO: 86385 - DNA, 15 bp, Homo sapiens
gggagggggctaaat

SEQ ID NO: 86386 - DNA, 15 bp, Homo sapiens
ggagggggctaaatg

SEQ ID NO: 86387 - DNA, 15 bp, Homo sapiens
gagggggctaaatga

SEQ ID NO: 86388 - DNA, 15 bp, Homo sapiens
agggggctaaatgac

SEQ ID NO: 86389 - DNA, 15 bp, Homo sapiens
gggggctaaatgact

SEQ ID NO: 86390 - DNA, 15 bp, Homo sapiens
ggggctaaatgactg

SEQ ID NO: 86391 - DNA, 15 bp, Homo sapiens
gggctaaatgactgg

SEQ ID NO: 86392 - DNA, 15 bp, Homo sapiens
ggctaaatgactggg

SEQ ID NO: 86393 - DNA, 15 bp, Homo sapiens
gctaaatgactggga

SEQ ID NO: 86394 - DNA, 15 bp, Homo sapiens
ctaaatgactgggat

SEQ ID NO: 86395 - DNA, 15 bp, Homo sapiens
taaatgactgggata

SEQ ID NO: 86396 - DNA, 15 bp, Homo sapiens
aaatgactgggatat

SEQ ID NO: 86397 - DNA, 15 bp, Homo sapiens
aatgactgggatatg

SEQ ID NO: 86398 - DNA, 15 bp, Homo sapiens
atgactgggatatga

SEQ ID NO: 86399 - DNA, 15 bp, Homo sapiens
tgactgggatatgaa

SEQ ID NO: 86400 - DNA, 15 bp, Homo sapiens
gactgggatatgaag

SEQ ID NO: 86401 - DNA, 15 bp, Homo sapiens
actgggatatgaagt

SEQ ID NO: 86402 - DNA, 15 bp, Homo sapiens
ctgggatatgaagta

SEQ ID NO: 86403 - DNA, 15 bp, Homo sapiens
tgggatatgaagtag

SEQ ID NO: 86404 - DNA, 15 bp, Homo sapiens
gggatatgaagtagg

SEQ ID NO: 86405 - DNA, 15 bp, Homo sapiens
ggatatgaagtagga

SEQ ID NO: 86406 - DNA, 15 bp, Homo sapiens
gatatgaagtaggaa

SEQ ID NO: 86407 - DNA, 15 bp, Homo sapiens
atatgaagtaggaat

SEQ ID NO: 86408 - DNA, 15 bp, Homo sapiens
tatgaagtaggaatg

SEQ ID NO: 86409 - DNA, 15 bp, Homo sapiens
atgaagtaggaatgg

SEQ ID NO: 86410 - DNA, 15 bp, Homo sapiens
tgaagtaggaatggg

SEQ ID NO: 86411 - DNA, 15 bp, Homo sapiens
gaagtaggaatggga

SEQ ID NO: 86412 - DNA, 15 bp, Homo sapiens
aagtaggaatgggag

SEQ ID NO: 86413 - DNA, 15 bp, Homo sapiens
agtaggaatgggaga

SEQ ID NO: 86414 - DNA, 15 bp, Homo sapiens
gtaggaatgggagag

SEQ ID NO: 86415 - DNA, 15 bp, Homo sapiens
taggaatgggagagg

SEQ ID NO: 86416 - DNA, 15 bp, Homo sapiens
aggaatgggagagga

SEQ ID NO: 86417 - DNA, 15 bp, Homo sapiens
ggaatgggagaggaa

SEQ ID NO: 86418 - DNA, 15 bp, Homo sapiens
gaatgggagaggaaa

SEQ ID NO: 86419 - DNA, 15 bp, Homo sapiens
aatgggagaggaaag

SEQ ID NO: 86420 - DNA, 15 bp, Homo sapiens
atgggagaggaaaga

SEQ ID NO: 86421 - DNA, 15 bp, Homo sapiens
tgggagaggaaagaa

SEQ ID NO: 86422 - DNA, 15 bp, Homo sapiens
gggagaggaaagaaa

SEQ ID NO: 86423 - DNA, 15 bp, Homo sapiens
ggagaggaaagaaat

SEQ ID NO: 86424 - DNA, 15 bp, Homo sapiens
gagaggaaagaaata

SEQ ID NO: 86425 - DNA, 15 bp, Homo sapiens
agaggaaagaaatag

SEQ ID NO: 86426 - DNA, 15 bp, Homo sapiens
gaggaaagaaataga

SEQ ID NO: 86427 - DNA, 15 bp, Homo sapiens
aggaaagaaatagat

SEQ ID NO: 86428 - DNA, 15 bp, Homo sapiens
ggaaagaaatagatg

SEQ ID NO: 86429 - DNA, 15 bp, Homo sapiens
gaaagaaatagatgg

SEQ ID NO: 86430 - DNA, 15 bp, Homo sapiens
aaagaaatagatggg

SEQ ID NO: 86431 - DNA, 15 bp, Homo sapiens
aagaaatagatggga

SEQ ID NO: 86432 - DNA, 15 bp, Homo sapiens
agaaatagatgggaa

SEQ ID NO: 86433 - DNA, 15 bp, Homo sapiens
gaaatagatgggaac

SEQ ID NO: 86434 - DNA, 15 bp, Homo sapiens
aaatagatgggaact

SEQ ID NO: 86435 - DNA, 15 bp, Homo sapiens
aatagatgggaactc

SEQ ID NO: 86436 - DNA, 15 bp, Homo sapiens
atagatgggaactca

SEQ ID NO: 86437 - DNA, 15 bp, Homo sapiens
tagatgggaactcag

SEQ ID NO: 86438 - DNA, 15 bp, Homo sapiens
agatgggaactcagt

SEQ ID NO: 86439 - DNA, 15 bp, Homo sapiens
gatgggaactcagtc

SEQ ID NO: 86440 - DNA, 15 bp, Homo sapiens
atgggaactcagtca

SEQ ID NO: 86441 - DNA, 15 bp, Homo sapiens
tgggaactcagtcat

SEQ ID NO: 86442 - DNA, 15 bp, Homo sapiens
gggaactcagtcatt

SEQ ID NO: 86443 - DNA, 15 bp, Homo sapiens
ggaactcagtcattt

SEQ ID NO: 86444 - DNA, 15 bp, Homo sapiens
gaactcagtcatttg

SEQ ID NO: 86445 - DNA, 15 bp, Homo sapiens
aactcagtcatttgg

SEQ ID NO: 86446 - DNA, 15 bp, Homo sapiens
actcagtcatttggg

SEQ ID NO: 86447 - DNA, 15 bp, Homo sapiens
ctcagtcatttggga

SEQ ID NO: 86448 - DNA, 15 bp, Homo sapiens
tcagtcatttgggaa

SEQ ID NO: 86449 - DNA, 15 bp, Homo sapiens
cagtcatttgggaat

SEQ ID NO: 86450 - DNA, 15 bp, Homo sapiens
agtcatttgggaatg

SEQ ID NO: 86451 - DNA, 15 bp, Homo sapiens
gtcatttgggaatga

SEQ ID NO: 86452 - DNA, 15 bp, Homo sapiens
tcatttgggaatgat

SEQ ID NO: 86453 - DNA, 15 bp, Homo sapiens
catttgggaatgatt

SEQ ID NO: 86454 - DNA, 15 bp, Homo sapiens
atttgggaatgattc

SEQ ID NO: 86455 - DNA, 15 bp, Homo sapiens
tttgggaatgattca

SEQ ID NO: 86456 - DNA, 15 bp, Homo sapiens
ttgggaatgattcat

SEQ ID NO: 86457 - DNA, 15 bp, Homo sapiens
tgggaatgattcata

SEQ ID NO: 86458 - DNA, 15 bp, Homo sapiens
gggaatgattcatat

SEQ ID NO: 86459 - DNA, 15 bp, Homo sapiens
ggaatgattcatatg

SEQ ID NO: 86460 - DNA, 15 bp, Homo sapiens
gaatgattcatatgg

SEQ ID NO: 86461 - DNA, 15 bp, Homo sapiens
aatgattcatatgga

SEQ ID NO: 86462 - DNA, 15 bp, Homo sapiens
atgattcatatggaa

SEQ ID NO: 86463 - DNA, 15 bp, Homo sapiens
tgattcatatggaat

SEQ ID NO: 86464 - DNA, 15 bp, Homo sapiens
gattcatatggaatg

SEQ ID NO: 86465 - DNA, 15 bp, Homo sapiens
attcatatggaatgt

SEQ ID NO: 86466 - DNA, 15 bp, Homo sapiens
ttcatatggaatgtt

SEQ ID NO: 86467 - DNA, 15 bp, Homo sapiens
tcatatggaatgttt

SEQ ID NO: 86468 - DNA, 15 bp, Homo sapiens
catatggaatgtttt

SEQ ID NO: 86469 - DNA, 15 bp, Homo sapiens
atatggaatgttttt

SEQ ID NO: 86470 - DNA, 15 bp, Homo sapiens
tatggaatgttttta

SEQ ID NO: 86471 - DNA, 15 bp, Homo sapiens
atggaatgtttttac

SEQ ID NO: 86472 - DNA, 15 bp, Homo sapiens
tggaatgtttttact

SEQ ID NO: 86473 - DNA, 15 bp, Homo sapiens
ggaatgtttttactg

SEQ ID NO: 86474 - DNA, 15 bp, Homo sapiens
gaatgtttttactgc

SEQ ID NO: 86475 - DNA, 15 bp, Homo sapiens
aatgtttttactgct

SEQ ID NO: 86476 - DNA, 15 bp, Homo sapiens
atgtttttactgctt

SEQ ID NO: 86477 - DNA, 15 bp, Homo sapiens
tgtttttactgcttc

SEQ ID NO: 86478 - DNA, 15 bp, Homo sapiens
gtttttactgcttcc

SEQ ID NO: 86479 - DNA, 15 bp, Homo sapiens
tttttactgcttcca

SEQ ID NO: 86480 - DNA, 15 bp, Homo sapiens
ttttactgcttccac

SEQ ID NO: 86481 - DNA, 15 bp, Homo sapiens
tttactgcttccact

SEQ ID NO: 86482 - DNA, 15 bp, Homo sapiens
ttactgcttccactc

SEQ ID NO: 86483 - DNA, 15 bp, Homo sapiens
tactgcttccactcc

SEQ ID NO: 86484 - DNA, 15 bp, Homo sapiens
actgcttccactcct

SEQ ID NO: 86485 - DNA, 15 bp, Homo sapiens
ctgcttccactcctg

SEQ ID NO: 86486 - DNA, 15 bp, Homo sapiens
tgcttccactcctgt

SEQ ID NO: 86487 - DNA, 15 bp, Homo sapiens
gcttccactcctgtc

SEQ ID NO: 86488 - DNA, 15 bp, Homo sapiens
cttccactcctgtct

SEQ ID NO: 86489 - DNA, 15 bp, Homo sapiens
ttccactcctgtctg

SEQ ID NO: 86490 - DNA, 15 bp, Homo sapiens
tccactcctgtctgc

SEQ ID NO: 86491 - DNA, 15 bp, Homo sapiens
ccactcctgtctgcc

SEQ ID NO: 86492 - DNA, 15 bp, Homo sapiens
cactcctgtctgcct

SEQ ID NO: 86493 - DNA, 15 bp, Homo sapiens
actcctgtctgcctt

SEQ ID NO: 86494 - DNA, 15 bp, Homo sapiens
ctcctgtctgccttc

SEQ ID NO: 86495 - DNA, 15 bp, Homo sapiens
tcctgtctgccttcc

SEQ ID NO: 86496 - DNA, 15 bp, Homo sapiens
cctgtctgccttcca

SEQ ID NO: 86497 - DNA, 15 bp, Homo sapiens
ctgtctgccttccaa

SEQ ID NO: 86498 - DNA, 15 bp, Homo sapiens
tgtctgccttccaat

SEQ ID NO: 86499 - DNA, 15 bp, Homo sapiens
gtctgccttccaatt

SEQ ID NO: 86500 - DNA, 15 bp, Homo sapiens
tctgccttccaattt

SEQ ID NO: 86501 - DNA, 15 bp, Homo sapiens
ctgccttccaattta

SEQ ID NO: 86502 - DNA, 15 bp, Homo sapiens
tgccttccaatttat

SEQ ID NO: 86503 - DNA, 15 bp, Homo sapiens
gccttccaatttatt

SEQ ID NO: 86504 - DNA, 15 bp, Homo sapiens
ccttccaatttattc

SEQ ID NO: 86505 - DNA, 15 bp, Homo sapiens
cttccaatttattct

SEQ ID NO: 86506 - DNA, 15 bp, Homo sapiens
ttccaatttattctc

SEQ ID NO: 86507 - DNA, 15 bp, Homo sapiens
tccaatttattctca

SEQ ID NO: 86508 - DNA, 15 bp, Homo sapiens
ccaatttattctcaa

SEQ ID NO: 86509 - DNA, 15 bp, Homo sapiens
caatttattctcaat

SEQ ID NO: 86510 - DNA, 15 bp, Homo sapiens
aatttattctcaatc

SEQ ID NO: 86511 - DNA, 15 bp, Homo sapiens
atttattctcaatcc

SEQ ID NO: 86512 - DNA, 15 bp, Homo sapiens
tttattctcaatccc

SEQ ID NO: 86513 - DNA, 15 bp, Homo sapiens
ttattctcaatccct

SEQ ID NO: 86514 - DNA, 15 bp, Homo sapiens
tattctcaatccctc

SEQ ID NO: 86515 - DNA, 15 bp, Homo sapiens
attctcaatccctca

SEQ ID NO: 86516 - DNA, 15 bp, Homo sapiens
ttctcaatccctcag

SEQ ID NO: 86517 - DNA, 15 bp, Homo sapiens
tctcaatccctcaga

SEQ ID NO: 86518 - DNA, 15 bp, Homo sapiens
ctcaatccctcagag

SEQ ID NO: 86519 - DNA, 15 bp, Homo sapiens
tcaatccctcagagt

SEQ ID NO: 86520 - DNA, 15 bp, Homo sapiens
caatccctcagagtg

SEQ ID NO: 86521 - DNA, 15 bp, Homo sapiens
aatccctcagagtga

SEQ ID NO: 86522 - DNA, 15 bp, Homo sapiens
atccctcagagtgat

SEQ ID NO: 86523 - DNA, 15 bp, Homo sapiens
tccctcagagtgatc

SEQ ID NO: 86524 - DNA, 15 bp, Homo sapiens
ccctcagagtgatct

SEQ ID NO: 86525 - DNA, 15 bp, Homo sapiens
cctcagagtgatctt

SEQ ID NO: 86526 - DNA, 15 bp, Homo sapiens
ctcagagtgatctta

SEQ ID NO: 86527 - DNA, 15 bp, Homo sapiens
tcagagtgatcttaa

SEQ ID NO: 86528 - DNA, 15 bp, Homo sapiens
cagagtgatcttaaa

SEQ ID NO: 86529 - DNA, 15 bp, Homo sapiens
agagtgatcttaaaa

SEQ ID NO: 86530 - DNA, 15 bp, Homo sapiens
gagtgatcttaaaaa

SEQ ID NO: 86531 - DNA, 15 bp, Homo sapiens
agtgatcttaaaaat

SEQ ID NO: 86532 - DNA, 15 bp, Homo sapiens
gtgatcttaaaaata

SEQ ID NO: 86533 - DNA, 15 bp, Homo sapiens
tgatcttaaaaatag

SEQ ID NO: 86534 - DNA, 15 bp, Homo sapiens
gatcttaaaaataga

SEQ ID NO: 86535 - DNA, 15 bp, Homo sapiens
atcttaaaaatagac

SEQ ID NO: 86536 - DNA, 15 bp, Homo sapiens
tcttaaaaatagact

SEQ ID NO: 86537 - DNA, 15 bp, Homo sapiens
cttaaaaatagactt

SEQ ID NO: 86538 - DNA, 15 bp, Homo sapiens
ttaaaaatagacttg

SEQ ID NO: 86539 - DNA, 15 bp, Homo sapiens
taaaaatagacttga

SEQ ID NO: 86540 - DNA, 15 bp, Homo sapiens
aaaaatagacttgat

SEQ ID NO: 86541 - DNA, 15 bp, Homo sapiens
aaaatagacttgatt

SEQ ID NO: 86542 - DNA, 15 bp, Homo sapiens
aaatagacttgattg

SEQ ID NO: 86543 - DNA, 15 bp, Homo sapiens
aatagacttgattgt

SEQ ID NO: 86544 - DNA, 15 bp, Homo sapiens
atagacttgattgtg

SEQ ID NO: 86545 - DNA, 15 bp, Homo sapiens
tagacttgattgtgt

SEQ ID NO: 86546 - DNA, 15 bp, Homo sapiens
agacttgattgtgtc

SEQ ID NO: 86547 - DNA, 15 bp, Homo sapiens
gacttgattgtgtca

SEQ ID NO: 86548 - DNA, 15 bp, Homo sapiens
acttgattgtgtcac

SEQ ID NO: 86549 - DNA, 15 bp, Homo sapiens
cttgattgtgtcact

SEQ ID NO: 86550 - DNA, 15 bp, Homo sapiens
ttgattgtgtcactt

SEQ ID NO: 86551 - DNA, 15 bp, Homo sapiens
tgattgtgtcacttc

SEQ ID NO: 86552 - DNA, 15 bp, Homo sapiens
gattgtgtcacttct

SEQ ID NO: 86553 - DNA, 15 bp, Homo sapiens
attgtgtcacttctg

SEQ ID NO: 86554 - DNA, 15 bp, Homo sapiens
ttgtgtcacttctgt

SEQ ID NO: 86555 - DNA, 15 bp, Homo sapiens
tgtgtcacttctgtt

SEQ ID NO: 86556 - DNA, 15 bp, Homo sapiens
gtgtcacttctgttt

SEQ ID NO: 86557 - DNA, 15 bp, Homo sapiens
tgtcacttctgttta

SEQ ID NO: 86558 - DNA, 15 bp, Homo sapiens
gtcacttctgtttac

SEQ ID NO: 86559 - DNA, 15 bp, Homo sapiens
tcacttctgtttaca

SEQ ID NO: 86560 - DNA, 15 bp, Homo sapiens
cacttctgtttacac

SEQ ID NO: 86561 - DNA, 15 bp, Homo sapiens
acttctgtttacact

SEQ ID NO: 86562 - DNA, 15 bp, Homo sapiens
cttctgtttacactt

SEQ ID NO: 86563 - DNA, 15 bp, Homo sapiens
ttctgtttacacttt

SEQ ID NO: 86564 - DNA, 15 bp, Homo sapiens
tctgtttacacttta

SEQ ID NO: 86565 - DNA, 15 bp, Homo sapiens
ctgtttacactttat

SEQ ID NO: 86566 - DNA, 15 bp, Homo sapiens
tgtttacactttata

SEQ ID NO: 86567 - DNA, 15 bp, Homo sapiens
gtttacactttataa

SEQ ID NO: 86568 - DNA, 15 bp, Homo sapiens
tttacactttataag

SEQ ID NO: 86569 - DNA, 15 bp, Homo sapiens
ttacactttataagg

SEQ ID NO: 86570 - DNA, 15 bp, Homo sapiens
tacactttataagga

SEQ ID NO: 86571 - DNA, 15 bp, Homo sapiens
acactttataaggac

SEQ ID NO: 86572 - DNA, 15 bp, Homo sapiens
cactttataaggacc

SEQ ID NO: 86573 - DNA, 15 bp, Homo sapiens
actttataaggacct

SEQ ID NO: 86574 - DNA, 15 bp, Homo sapiens
ctttataaggacctt

SEQ ID NO: 86575 - DNA, 15 bp, Homo sapiens
tttataaggaccttg

SEQ ID NO: 86576 - DNA, 15 bp, Homo sapiens
ttataaggaccttgt

SEQ ID NO: 86577 - DNA, 15 bp, Homo sapiens
tataaggaccttgtg

SEQ ID NO: 86578 - DNA, 15 bp, Homo sapiens
ataaggaccttgtgt

SEQ ID NO: 86579 - DNA, 15 bp, Homo sapiens
taaggaccttgtgtt

SEQ ID NO: 86580 - DNA, 15 bp, Homo sapiens
aaggaccttgtgttt

SEQ ID NO: 86581 - DNA, 15 bp, Homo sapiens
aggaccttgtgtttt

SEQ ID NO: 86582 - DNA, 15 bp, Homo sapiens
ggaccttgtgttttt

SEQ ID NO: 86583 - DNA, 15 bp, Homo sapiens
gaccttgtgtttttt

SEQ ID NO: 86584 - DNA, 15 bp, Homo sapiens
accttgtgttttttt

SEQ ID NO: 86585 - DNA, 15 bp, Homo sapiens
ccttgtgtttttttt

SEQ ID NO: 86586 - DNA, 15 bp, Homo sapiens
cttgtgttttttttt

SEQ ID NO: 86587 - DNA, 15 bp, Homo sapiens
ttgtgtttttttttt

SEQ ID NO: 86588 - DNA, 15 bp, Homo sapiens
tgtgttttttttttt

SEQ ID NO: 86589 - DNA, 15 bp, Homo sapiens
gtgttttttttttta

SEQ ID NO: 86590 - DNA, 15 bp, Homo sapiens
tgtttttttttttac

SEQ ID NO: 86591 - DNA, 15 bp, Homo sapiens
gtttttttttttacc

SEQ ID NO: 86592 - DNA, 15 bp, Homo sapiens
tttttttttttacca

SEQ ID NO: 86593 - DNA, 15 bp, Homo sapiens
ttttttttttaccat

SEQ ID NO: 86594 - DNA, 15 bp, Homo sapiens
tttttttttaccatg

SEQ ID NO: 86595 - DNA, 15 bp, Homo sapiens
ttttttttaccatga

SEQ ID NO: 86596 - DNA, 15 bp, Homo sapiens
tttttttaccatgac

SEQ ID NO: 86597 - DNA, 15 bp, Homo sapiens
ttttttaccatgacc

SEQ ID NO: 86598 - DNA, 15 bp, Homo sapiens
tttttaccatgacct

SEQ ID NO: 86599 - DNA, 15 bp, Homo sapiens
ttttaccatgaccta

SEQ ID NO: 86600 - DNA, 15 bp, Homo sapiens
tttaccatgacctac

SEQ ID NO: 86601 - DNA, 15 bp, Homo sapiens
ttaccatgacctaca

SEQ ID NO: 86602 - DNA, 15 bp, Homo sapiens
taccatgacctacaa

SEQ ID NO: 86603 - DNA, 15 bp, Homo sapiens
accatgacctacaag

SEQ ID NO: 86604 - DNA, 15 bp, Homo sapiens
ccatgacctacaagg

SEQ ID NO: 86605 - DNA, 15 bp, Homo sapiens
catgacctacaaggc

SEQ ID NO: 86606 - DNA, 15 bp, Homo sapiens
atgacctacaaggcc

SEQ ID NO: 86607 - DNA, 15 bp, Homo sapiens
tgacctacaaggccc

SEQ ID NO: 86608 - DNA, 15 bp, Homo sapiens
gacctacaaggccca

SEQ ID NO: 86609 - DNA, 15 bp, Homo sapiens
acctacaaggcccag

SEQ ID NO: 86610 - DNA, 15 bp, Homo sapiens
cctacaaggcccagc

SEQ ID NO: 86611 - DNA, 15 bp, Homo sapiens
ctacaaggcccagca

SEQ ID NO: 86612 - DNA, 15 bp, Homo sapiens
tacaaggcccagcat

SEQ ID NO: 86613 - DNA, 15 bp, Homo sapiens
acaaggcccagcata

SEQ ID NO: 86614 - DNA, 15 bp, Homo sapiens
caaggcccagcataa

SEQ ID NO: 86615 - DNA, 15 bp, Homo sapiens
aaggcccagcataat

SEQ ID NO: 86616 - DNA, 15 bp, Homo sapiens
aggcccagcataatt

SEQ ID NO: 86617 - DNA, 15 bp, Homo sapiens
ggcccagcataattt

SEQ ID NO: 86618 - DNA, 15 bp, Homo sapiens
gcccagcataattta

SEQ ID NO: 86619 - DNA, 15 bp, Homo sapiens
cccagcataatttag

SEQ ID NO: 86620 - DNA, 15 bp, Homo sapiens
ccagcataatttagc

SEQ ID NO: 86621 - DNA, 15 bp, Homo sapiens
cagcataatttagca

SEQ ID NO: 86622 - DNA, 15 bp, Homo sapiens
agcataatttagcac

SEQ ID NO: 86623 - DNA, 15 bp, Homo sapiens
gcataatttagcaca

SEQ ID NO: 86624 - DNA, 15 bp, Homo sapiens
cataatttagcacag

SEQ ID NO: 86625 - DNA, 15 bp, Homo sapiens
ataatttagcacagg

SEQ ID NO: 86626 - DNA, 15 bp, Homo sapiens
taatttagcacaggg

SEQ ID NO: 86627 - DNA, 15 bp, Homo sapiens
aatttagcacagggc

SEQ ID NO: 86628 - DNA, 15 bp, Homo sapiens
atttagcacagggct

SEQ ID NO: 86629 - DNA, 15 bp, Homo sapiens
tttagcacagggcta

SEQ ID NO: 86630 - DNA, 15 bp, Homo sapiens
ttagcacagggctac

SEQ ID NO: 86631 - DNA, 15 bp, Homo sapiens
tagcacagggctacc

SEQ ID NO: 86632 - DNA, 15 bp, Homo sapiens
agcacagggctacct

SEQ ID NO: 86633 - DNA, 15 bp, Homo sapiens
gcacagggctacctc

SEQ ID NO: 86634 - DNA, 15 bp, Homo sapiens
cacagggctacctcc

SEQ ID NO: 86635 - DNA, 15 bp, Homo sapiens
acagggctacctcct

SEQ ID NO: 86636 - DNA, 15 bp, Homo sapiens
cagggctacctccta

SEQ ID NO: 86637 - DNA, 15 bp, Homo sapiens
agggctacctcctac

SEQ ID NO: 86638 - DNA, 15 bp, Homo sapiens
gggctacctcctaca

SEQ ID NO: 86639 - DNA, 15 bp, Homo sapiens
ggctacctcctacat

SEQ ID NO: 86640 - DNA, 15 bp, Homo sapiens
gctacctcctacatc

SEQ ID NO: 86641 - DNA, 15 bp, Homo sapiens
ctacctcctacatca

SEQ ID NO: 86642 - DNA, 15 bp, Homo sapiens
tacctcctacatcag

SEQ ID NO: 86643 - DNA, 15 bp, Homo sapiens
acctcctacatcagc

SEQ ID NO: 86644 - DNA, 15 bp, Homo sapiens
cctcctacatcagca

SEQ ID NO: 86645 - DNA, 15 bp, Homo sapiens
ctcctacatcagcac

SEQ ID NO: 86646 - DNA, 15 bp, Homo sapiens
tcctacatcagcact

SEQ ID NO: 86647 - DNA, 15 bp, Homo sapiens
cctacatcagcacta

SEQ ID NO: 86648 - DNA, 15 bp, Homo sapiens
ctacatcagcactag

SEQ ID NO: 86649 - DNA, 15 bp, Homo sapiens
tacatcagcactagt

SEQ ID NO: 86650 - DNA, 15 bp, Homo sapiens
acatcagcactagtc

SEQ ID NO: 86651 - DNA, 15 bp, Homo sapiens
catcagcactagtca

SEQ ID NO: 86652 - DNA, 15 bp, Homo sapiens
atcagcactagtcac

SEQ ID NO: 86653 - DNA, 15 bp, Homo sapiens
tcagcactagtcacc

SEQ ID NO: 86654 - DNA, 15 bp, Homo sapiens
cagcactagtcacct

SEQ ID NO: 86655 - DNA, 15 bp, Homo sapiens
agcactagtcacctt

SEQ ID NO: 86656 - DNA, 15 bp, Homo sapiens
gcactagtcaccttc

SEQ ID NO: 86657 - DNA, 15 bp, Homo sapiens
cactagtcaccttct

SEQ ID NO: 86658 - DNA, 15 bp, Homo sapiens
actagtcaccttctc

SEQ ID NO: 86659 - DNA, 15 bp, Homo sapiens
ctagtcaccttctct

SEQ ID NO: 86660 - DNA, 15 bp, Homo sapiens
tagtcaccttctctc

SEQ ID NO: 86661 - DNA, 15 bp, Homo sapiens
agtcaccttctctcc

SEQ ID NO: 86662 - DNA, 15 bp, Homo sapiens
gtcaccttctctcct

SEQ ID NO: 86663 - DNA, 15 bp, Homo sapiens
tcaccttctctcctt

SEQ ID NO: 86664 - DNA, 15 bp, Homo sapiens
caccttctctccttg

SEQ ID NO: 86665 - DNA, 15 bp, Homo sapiens
accttctctccttgt

SEQ ID NO: 86666 - DNA, 15 bp, Homo sapiens
ccttctctccttgtt

SEQ ID NO: 86667 - DNA, 15 bp, Homo sapiens
cttctctccttgttt

SEQ ID NO: 86668 - DNA, 15 bp, Homo sapiens
ttctctccttgtttc

SEQ ID NO: 86669 - DNA, 15 bp, Homo sapiens
tctctccttgtttct

SEQ ID NO: 86670 - DNA, 15 bp, Homo sapiens
ctctccttgtttctt

SEQ ID NO: 86671 - DNA, 15 bp, Homo sapiens
tctccttgtttcttg

SEQ ID NO: 86672 - DNA, 15 bp, Homo sapiens
ctccttgtttcttga

SEQ ID NO: 86673 - DNA, 15 bp, Homo sapiens
tccttgtttcttgag

SEQ ID NO: 86674 - DNA, 15 bp, Homo sapiens
ccttgtttcttgaga

SEQ ID NO: 86675 - DNA, 15 bp, Homo sapiens
cttgtttcttgagat

SEQ ID NO: 86676 - DNA, 15 bp, Homo sapiens
ttgtttcttgagatt

SEQ ID NO: 86677 - DNA, 15 bp, Homo sapiens
tgtttcttgagattc

SEQ ID NO: 86678 - DNA, 15 bp, Homo sapiens
gtttcttgagattca

SEQ ID NO: 86679 - DNA, 15 bp, Homo sapiens
tttcttgagattcag

SEQ ID NO: 86680 - DNA, 15 bp, Homo sapiens
ttcttgagattcagt

SEQ ID NO: 86681 - DNA, 15 bp, Homo sapiens
tcttgagattcagtc

SEQ ID NO: 86682 - DNA, 15 bp, Homo sapiens
cttgagattcagtca

SEQ ID NO: 86683 - DNA, 15 bp, Homo sapiens
ttgagattcagtcat

SEQ ID NO: 86684 - DNA, 15 bp, Homo sapiens
tgagattcagtcata

SEQ ID NO: 86685 - DNA, 15 bp, Homo sapiens
gagattcagtcatac

SEQ ID NO: 86686 - DNA, 15 bp, Homo sapiens
agattcagtcatact

SEQ ID NO: 86687 - DNA, 15 bp, Homo sapiens
gattcagtcatactg

SEQ ID NO: 86688 - DNA, 15 bp, Homo sapiens
attcagtcatactgg

SEQ ID NO: 86689 - DNA, 15 bp, Homo sapiens
ttcagtcatactggt

SEQ ID NO: 86690 - DNA, 15 bp, Homo sapiens
tcagtcatactggtc

SEQ ID NO: 86691 - DNA, 15 bp, Homo sapiens
cagtcatactggtct

SEQ ID NO: 86692 - DNA, 15 bp, Homo sapiens
agtcatactggtctt

SEQ ID NO: 86693 - DNA, 15 bp, Homo sapiens
gtcatactggtcttt

SEQ ID NO: 86694 - DNA, 15 bp, Homo sapiens
tcatactggtctttc

SEQ ID NO: 86695 - DNA, 15 bp, Homo sapiens
catactggtctttct

SEQ ID NO: 86696 - DNA, 15 bp, Homo sapiens
atactggtctttctt

SEQ ID NO: 86697 - DNA, 15 bp, Homo sapiens
tactggtctttcttc

SEQ ID NO: 86698 - DNA, 15 bp, Homo sapiens
actggtctttcttca

SEQ ID NO: 86699 - DNA, 15 bp, Homo sapiens
ctggtctttcttcag

SEQ ID NO: 86700 - DNA, 15 bp, Homo sapiens
tggtctttcttcagt

SEQ ID NO: 86701 - DNA, 15 bp, Homo sapiens
ggtctttcttcagtt

SEQ ID NO: 86702 - DNA, 15 bp, Homo sapiens
gtctttcttcagttc

SEQ ID NO: 86703 - DNA, 15 bp, Homo sapiens
tctttcttcagttct

SEQ ID NO: 86704 - DNA, 15 bp, Homo sapiens
ctttcttcagttctt

SEQ ID NO: 86705 - DNA, 15 bp, Homo sapiens
tttcttcagttcttc

SEQ ID NO: 86706 - DNA, 15 bp, Homo sapiens
ttcttcagttcttca

SEQ ID NO: 86707 - DNA, 15 bp, Homo sapiens
tcttcagttcttcaa

SEQ ID NO: 86708 - DNA, 15 bp, Homo sapiens
cttcagttcttcaaa

SEQ ID NO: 86709 - DNA, 15 bp, Homo sapiens
ttcagttcttcaaaa

SEQ ID NO: 86710 - DNA, 15 bp, Homo sapiens
tcagttcttcaaaat

SEQ ID NO: 86711 - DNA, 15 bp, Homo sapiens
cagttcttcaaaatg

SEQ ID NO: 86712 - DNA, 15 bp, Homo sapiens
agttcttcaaaatgc

SEQ ID NO: 86713 - DNA, 15 bp, Homo sapiens
gttcttcaaaatgct

SEQ ID NO: 86714 - DNA, 15 bp, Homo sapiens
ttcttcaaaatgcta

SEQ ID NO: 86715 - DNA, 15 bp, Homo sapiens
tcttcaaaatgctaa

SEQ ID NO: 86716 - DNA, 15 bp, Homo sapiens
cttcaaaatgctaag

SEQ ID NO: 86717 - DNA, 15 bp, Homo sapiens
ttcaaaatgctaagc

SEQ ID NO: 86718 - DNA, 15 bp, Homo sapiens
tcaaaatgctaagct

SEQ ID NO: 86719 - DNA, 15 bp, Homo sapiens
caaaatgctaagctt

SEQ ID NO: 86720 - DNA, 15 bp, Homo sapiens
aaaatgctaagcttc

SEQ ID NO: 86721 - DNA, 15 bp, Homo sapiens
aaatgctaagcttct

SEQ ID NO: 86722 - DNA, 15 bp, Homo sapiens
aatgctaagcttctg

SEQ ID NO: 86723 - DNA, 15 bp, Homo sapiens
atgctaagcttctgc

SEQ ID NO: 86724 - DNA, 15 bp, Homo sapiens
tgctaagcttctgcc

SEQ ID NO: 86725 - DNA, 15 bp, Homo sapiens
gctaagcttctgcct

SEQ ID NO: 86726 - DNA, 15 bp, Homo sapiens
ctaagcttctgcctc

SEQ ID NO: 86727 - DNA, 15 bp, Homo sapiens
taagcttctgcctct

SEQ ID NO: 86728 - DNA, 15 bp, Homo sapiens
aagcttctgcctctt

SEQ ID NO: 86729 - DNA, 15 bp, Homo sapiens
agcttctgcctcttc

SEQ ID NO: 86730 - DNA, 15 bp, Homo sapiens
gcttctgcctcttct

SEQ ID NO: 86731 - DNA, 15 bp, Homo sapiens
cttctgcctcttcta

SEQ ID NO: 86732 - DNA, 15 bp, Homo sapiens
ttctgcctcttctag

SEQ ID NO: 86733 - DNA, 15 bp, Homo sapiens
tctgcctcttctagt

SEQ ID NO: 86734 - DNA, 15 bp, Homo sapiens
ctgcctcttctagtc

SEQ ID NO: 86735 - DNA, 15 bp, Homo sapiens
tgcctcttctagtct

SEQ ID NO: 86736 - DNA, 15 bp, Homo sapiens
gcctcttctagtctt

SEQ ID NO: 86737 - DNA, 15 bp, Homo sapiens
cctcttctagtcttt

SEQ ID NO: 86738 - DNA, 15 bp, Homo sapiens
ctcttctagtctttc

SEQ ID NO: 86739 - DNA, 15 bp, Homo sapiens
tcttctagtctttcc

SEQ ID NO: 86740 - DNA, 15 bp, Homo sapiens
cttctagtctttcca

SEQ ID NO: 86741 - DNA, 15 bp, Homo sapiens
ttctagtctttccag

SEQ ID NO: 86742 - DNA, 15 bp, Homo sapiens
tctagtctttccagt

SEQ ID NO: 86743 - DNA, 15 bp, Homo sapiens
ctagtctttccagtt

SEQ ID NO: 86744 - DNA, 15 bp, Homo sapiens
tagtctttccagtta

SEQ ID NO: 86745 - DNA, 15 bp, Homo sapiens
agtctttccagttat

SEQ ID NO: 86746 - DNA, 15 bp, Homo sapiens
gtctttccagttatt

SEQ ID NO: 86747 - DNA, 15 bp, Homo sapiens
tctttccagttattt

SEQ ID NO: 86748 - DNA, 15 bp, Homo sapiens
ctttccagttatttt

SEQ ID NO: 86749 - DNA, 15 bp, Homo sapiens
tttccagttattttc

SEQ ID NO: 86750 - DNA, 15 bp, Homo sapiens
ttccagttattttcc

SEQ ID NO: 86751 - DNA, 15 bp, Homo sapiens
tccagttattttcct

SEQ ID NO: 86752 - DNA, 15 bp, Homo sapiens
ccagttattttcctt

SEQ ID NO: 86753 - DNA, 15 bp, Homo sapiens
cagttattttccttc

SEQ ID NO: 86754 - DNA, 15 bp, Homo sapiens
agttattttccttct

SEQ ID NO: 86755 - DNA, 15 bp, Homo sapiens
gttattttccttctc

SEQ ID NO: 86756 - DNA, 15 bp, Homo sapiens
ttattttccttctcc

SEQ ID NO: 86757 - DNA, 15 bp, Homo sapiens
tattttccttctccc

SEQ ID NO: 86758 - DNA, 15 bp, Homo sapiens
attttccttctccct

SEQ ID NO: 86759 - DNA, 15 bp, Homo sapiens
ttttccttctccctg

SEQ ID NO: 86760 - DNA, 15 bp, Homo sapiens
tttccttctccctgt

SEQ ID NO: 86761 - DNA, 15 bp, Homo sapiens
ttccttctccctgta

SEQ ID NO: 86762 - DNA, 15 bp, Homo sapiens
tccttctccctgtac

SEQ ID NO: 86763 - DNA, 15 bp, Homo sapiens
ccttctccctgtacc

SEQ ID NO: 86764 - DNA, 15 bp, Homo sapiens
cttctccctgtacct

SEQ ID NO: 86765 - DNA, 15 bp, Homo sapiens
ttctccctgtacctt

SEQ ID NO: 86766 - DNA, 15 bp, Homo sapiens
tctccctgtaccttt

SEQ ID NO: 86767 - DNA, 15 bp, Homo sapiens
ctccctgtacctttt

SEQ ID NO: 86768 - DNA, 15 bp, Homo sapiens
tccctgtaccttttc

SEQ ID NO: 86769 - DNA, 15 bp, Homo sapiens
ccctgtaccttttca

SEQ ID NO: 86770 - DNA, 15 bp, Homo sapiens
cctgtaccttttcat

SEQ ID NO: 86771 - DNA, 15 bp, Homo sapiens
ctgtaccttttcatc

SEQ ID NO: 86772 - DNA, 15 bp, Homo sapiens
tgtaccttttcatct

SEQ ID NO: 86773 - DNA, 15 bp, Homo sapiens
gtaccttttcatctc

SEQ ID NO: 86774 - DNA, 15 bp, Homo sapiens
taccttttcatctca

SEQ ID NO: 86775 - DNA, 15 bp, Homo sapiens
accttttcatctcag

SEQ ID NO: 86776 - DNA, 15 bp, Homo sapiens
ccttttcatctcagc

SEQ ID NO: 86777 - DNA, 15 bp, Homo sapiens
cttttcatctcagcc

SEQ ID NO: 86778 - DNA, 15 bp, Homo sapiens
ttttcatctcagcct

SEQ ID NO: 86779 - DNA, 15 bp, Homo sapiens
tttcatctcagcctt

SEQ ID NO: 86780 - DNA, 15 bp, Homo sapiens
ttcatctcagccttt

SEQ ID NO: 86781 - DNA, 15 bp, Homo sapiens
tcatctcagcctttt

SEQ ID NO: 86782 - DNA, 15 bp, Homo sapiens
catctcagccttttc

SEQ ID NO: 86783 - DNA, 15 bp, Homo sapiens
atctcagccttttcc

SEQ ID NO: 86784 - DNA, 15 bp, Homo sapiens
tctcagccttttccc

SEQ ID NO: 86785 - DNA, 15 bp, Homo sapiens
ctcagccttttcccc

SEQ ID NO: 86786 - DNA, 15 bp, Homo sapiens
tcagccttttcccct

SEQ ID NO: 86787 - DNA, 15 bp, Homo sapiens
cagccttttcccctg

SEQ ID NO: 86788 - DNA, 15 bp, Homo sapiens
agccttttcccctga

SEQ ID NO: 86789 - DNA, 15 bp, Homo sapiens
gccttttcccctgac

SEQ ID NO: 86790 - DNA, 15 bp, Homo sapiens
ccttttcccctgacc

SEQ ID NO: 86791 - DNA, 15 bp, Homo sapiens
cttttcccctgacct

SEQ ID NO: 86792 - DNA, 15 bp, Homo sapiens
ttttcccctgacctt

SEQ ID NO: 86793 - DNA, 15 bp, Homo sapiens
tttcccctgaccttc

SEQ ID NO: 86794 - DNA, 15 bp, Homo sapiens
ttcccctgaccttcc

SEQ ID NO: 86795 - DNA, 15 bp, Homo sapiens
tcccctgaccttcca

SEQ ID NO: 86796 - DNA, 15 bp, Homo sapiens
cccctgaccttccat

SEQ ID NO: 86797 - DNA, 15 bp, Homo sapiens
ccctgaccttccata

SEQ ID NO: 86798 - DNA, 15 bp, Homo sapiens
cctgaccttccatag

SEQ ID NO: 86799 - DNA, 15 bp, Homo sapiens
ctgaccttccatagc

SEQ ID NO: 86800 - DNA, 15 bp, Homo sapiens
tgaccttccatagct

SEQ ID NO: 86801 - DNA, 15 bp, Homo sapiens
gaccttccatagcta

SEQ ID NO: 86802 - DNA, 15 bp, Homo sapiens
accttccatagctat

SEQ ID NO: 86803 - DNA, 15 bp, Homo sapiens
ccttccatagctatc

SEQ ID NO: 86804 - DNA, 15 bp, Homo sapiens
cttccatagctatct

SEQ ID NO: 86805 - DNA, 15 bp, Homo sapiens
ttccatagctatctt

SEQ ID NO: 86806 - DNA, 15 bp, Homo sapiens
tccatagctatcttc

SEQ ID NO: 86807 - DNA, 15 bp, Homo sapiens
ccatagctatcttca

SEQ ID NO: 86808 - DNA, 15 bp, Homo sapiens
catagctatcttcat

SEQ ID NO: 86809 - DNA, 15 bp, Homo sapiens
atagctatcttcata

SEQ ID NO: 86810 - DNA, 15 bp, Homo sapiens
tagctatcttcatat

SEQ ID NO: 86811 - DNA, 15 bp, Homo sapiens
agctatcttcatatt

SEQ ID NO: 86812 - DNA, 15 bp, Homo sapiens
gctatcttcatattt

SEQ ID NO: 86813 - DNA, 15 bp, Homo sapiens
ctatcttcatatttc

SEQ ID NO: 86814 - DNA, 15 bp, Homo sapiens
tatcttcatatttcc

SEQ ID NO: 86815 - DNA, 15 bp, Homo sapiens
atcttcatatttcca

SEQ ID NO: 86816 - DNA, 15 bp, Homo sapiens
tcttcatatttccag

SEQ ID NO: 86817 - DNA, 15 bp, Homo sapiens
cttcatatttccagc

SEQ ID NO: 86818 - DNA, 15 bp, Homo sapiens
ttcatatttccagcc

SEQ ID NO: 86819 - DNA, 15 bp, Homo sapiens
tcatatttccagcct

SEQ ID NO: 86820 - DNA, 15 bp, Homo sapiens
catatttccagcctt

SEQ ID NO: 86821 - DNA, 15 bp, Homo sapiens
atatttccagcctta

SEQ ID NO: 86822 - DNA, 15 bp, Homo sapiens
tatttccagccttag

SEQ ID NO: 86823 - DNA, 15 bp, Homo sapiens
atttccagccttagc

SEQ ID NO: 86824 - DNA, 15 bp, Homo sapiens
tttccagccttagct

SEQ ID NO: 86825 - DNA, 15 bp, Homo sapiens
ttccagccttagctt

SEQ ID NO: 86826 - DNA, 15 bp, Homo sapiens
tccagccttagcttc

SEQ ID NO: 86827 - DNA, 15 bp, Homo sapiens
ccagccttagcttca

SEQ ID NO: 86828 - DNA, 15 bp, Homo sapiens
cagccttagcttcaa

SEQ ID NO: 86829 - DNA, 15 bp, Homo sapiens
agccttagcttcaat

SEQ ID NO: 86830 - DNA, 15 bp, Homo sapiens
gccttagcttcaatc

SEQ ID NO: 86831 - DNA, 15 bp, Homo sapiens
ccttagcttcaatct

SEQ ID NO: 86832 - DNA, 15 bp, Homo sapiens
cttagcttcaatctc

SEQ ID NO: 86833 - DNA, 15 bp, Homo sapiens
ttagcttcaatctca

SEQ ID NO: 86834 - DNA, 15 bp, Homo sapiens
tagcttcaatctcat

SEQ ID NO: 86835 - DNA, 15 bp, Homo sapiens
agcttcaatctcata

SEQ ID NO: 86836 - DNA, 15 bp, Homo sapiens
gcttcaatctcatat

SEQ ID NO: 86837 - DNA, 15 bp, Homo sapiens
cttcaatctcatatt

SEQ ID NO: 86838 - DNA, 15 bp, Homo sapiens
ttcaatctcatattc

SEQ ID NO: 86839 - DNA, 15 bp, Homo sapiens
tcaatctcatattct

SEQ ID NO: 86840 - DNA, 15 bp, Homo sapiens
caatctcatattctc

SEQ ID NO: 86841 - DNA, 15 bp, Homo sapiens
aatctcatattctct

SEQ ID NO: 86842 - DNA, 15 bp, Homo sapiens
atctcatattctctg

SEQ ID NO: 86843 - DNA, 15 bp, Homo sapiens
tctcatattctctga

SEQ ID NO: 86844 - DNA, 15 bp, Homo sapiens
ctcatattctctgaa

SEQ ID NO: 86845 - DNA, 15 bp, Homo sapiens
tcatattctctgaag

SEQ ID NO: 86846 - DNA, 15 bp, Homo sapiens
catattctctgaagt

SEQ ID NO: 86847 - DNA, 15 bp, Homo sapiens
atattctctgaagtc

SEQ ID NO: 86848 - DNA, 15 bp, Homo sapiens
tattctctgaagtcc

SEQ ID NO: 86849 - DNA, 15 bp, Homo sapiens
attctctgaagtcct

SEQ ID NO: 86850 - DNA, 15 bp, Homo sapiens
ttctctgaagtcctt

SEQ ID NO: 86851 - DNA, 15 bp, Homo sapiens
tctctgaagtccttt

SEQ ID NO: 86852 - DNA, 15 bp, Homo sapiens
ctctgaagtcctttg

SEQ ID NO: 86853 - DNA, 15 bp, Homo sapiens
tctgaagtcctttga

SEQ ID NO: 86854 - DNA, 15 bp, Homo sapiens
ctgaagtcctttgat

SEQ ID NO: 86855 - DNA, 15 bp, Homo sapiens
tgaagtcctttgatt

SEQ ID NO: 86856 - DNA, 15 bp, Homo sapiens
gaagtcctttgattg

SEQ ID NO: 86857 - DNA, 15 bp, Homo sapiens
aagtcctttgattgt

SEQ ID NO: 86858 - DNA, 15 bp, Homo sapiens
agtcctttgattgtc

SEQ ID NO: 86859 - DNA, 15 bp, Homo sapiens
gtcctttgattgtcc

SEQ ID NO: 86860 - DNA, 15 bp, Homo sapiens
tcctttgattgtcct

SEQ ID NO: 86861 - DNA, 15 bp, Homo sapiens
cctttgattgtcctc

SEQ ID NO: 86862 - DNA, 15 bp, Homo sapiens
ctttgattgtcctcc

SEQ ID NO: 86863 - DNA, 15 bp, Homo sapiens
tttgattgtcctccc

SEQ ID NO: 86864 - DNA, 15 bp, Homo sapiens
ttgattgtcctcccg

SEQ ID NO: 86865 - DNA, 15 bp, Homo sapiens
tgattgtcctcccgt

SEQ ID NO: 86866 - DNA, 15 bp, Homo sapiens
gattgtcctcccgtt

SEQ ID NO: 86867 - DNA, 15 bp, Homo sapiens
attgtcctcccgtta

SEQ ID NO: 86868 - DNA, 15 bp, Homo sapiens
ttgtcctcccgttat

SEQ ID NO: 86869 - DNA, 15 bp, Homo sapiens
tgtcctcccgttatt

SEQ ID NO: 86870 - DNA, 15 bp, Homo sapiens
gtcctcccgttattc

SEQ ID NO: 86871 - DNA, 15 bp, Homo sapiens
tcctcccgttattct

SEQ ID NO: 86872 - DNA, 15 bp, Homo sapiens
cctcccgttattctt

SEQ ID NO: 86873 - DNA, 15 bp, Homo sapiens
ctcccgttattcttt

SEQ ID NO: 86874 - DNA, 15 bp, Homo sapiens
tcccgttattctttt

SEQ ID NO: 86875 - DNA, 15 bp, Homo sapiens
cccgttattcttttt

SEQ ID NO: 86876 - DNA, 15 bp, Homo sapiens
ccgttattctttttt

SEQ ID NO: 86877 - DNA, 15 bp, Homo sapiens
cgttattcttttttt

SEQ ID NO: 86878 - DNA, 15 bp, Homo sapiens
gttattcttttttta

SEQ ID NO: 86879 - DNA, 15 bp, Homo sapiens
ttattctttttttaa

SEQ ID NO: 86880 - DNA, 15 bp, Homo sapiens
tattctttttttaaa

SEQ ID NO: 86881 - DNA, 15 bp, Homo sapiens
attctttttttaaaa

SEQ ID NO: 86882 - DNA, 15 bp, Homo sapiens
ttctttttttaaaaa

SEQ ID NO: 86883 - DNA, 15 bp, Homo sapiens
tctttttttaaaaat

SEQ ID NO: 86884 - DNA, 15 bp, Homo sapiens
ctttttttaaaaatc

SEQ ID NO: 86885 - DNA, 15 bp, Homo sapiens
tttttttaaaaatcc

SEQ ID NO: 86886 - DNA, 15 bp, Homo sapiens
ttttttaaaaatcct

SEQ ID NO: 86887 - DNA, 15 bp, Homo sapiens
tttttaaaaatccta

SEQ ID NO: 86888 - DNA, 15 bp, Homo sapiens
ttttaaaaatcctat

SEQ ID NO: 86889 - DNA, 15 bp, Homo sapiens
tttaaaaatcctatt

SEQ ID NO: 86890 - DNA, 15 bp, Homo sapiens
ttaaaaatcctattt

SEQ ID NO: 86891 - DNA, 15 bp, Homo sapiens
taaaaatcctatttc

SEQ ID NO: 86892 - DNA, 15 bp, Homo sapiens
aaaaatcctatttcc

SEQ ID NO: 86893 - DNA, 15 bp, Homo sapiens
aaaatcctatttcct

SEQ ID NO: 86894 - DNA, 15 bp, Homo sapiens
aaatcctatttcctt

SEQ ID NO: 86895 - DNA, 15 bp, Homo sapiens
aatcctatttcctta

SEQ ID NO: 86896 - DNA, 15 bp, Homo sapiens
atcctatttccttat

SEQ ID NO: 86897 - DNA, 15 bp, Homo sapiens
tcctatttccttata

SEQ ID NO: 86898 - DNA, 15 bp, Homo sapiens
cctatttccttatat

SEQ ID NO: 86899 - DNA, 15 bp, Homo sapiens
ctatttccttatatt

SEQ ID NO: 86900 - DNA, 15 bp, Homo sapiens
tatttccttatattg

SEQ ID NO: 86901 - DNA, 15 bp, Homo sapiens
atttccttatattgt

SEQ ID NO: 86902 - DNA, 15 bp, Homo sapiens
tttccttatattgta

SEQ ID NO: 86903 - DNA, 15 bp, Homo sapiens
ttccttatattgtat

SEQ ID NO: 86904 - DNA, 15 bp, Homo sapiens
tccttatattgtatc

SEQ ID NO: 86905 - DNA, 15 bp, Homo sapiens
ccttatattgtatct

SEQ ID NO: 86906 - DNA, 15 bp, Homo sapiens
cttatattgtatctt

SEQ ID NO: 86907 - DNA, 15 bp, Homo sapiens
ttatattgtatctta

SEQ ID NO: 86908 - DNA, 15 bp, Homo sapiens
tatattgtatcttag

SEQ ID NO: 86909 - DNA, 15 bp, Homo sapiens
atattgtatcttaga

SEQ ID NO: 86910 - DNA, 15 bp, Homo sapiens
tattgtatcttagaa

SEQ ID NO: 86911 - DNA, 15 bp, Homo sapiens
attgtatcttagaat

SEQ ID NO: 86912 - DNA, 15 bp, Homo sapiens
ttgtatcttagaatt

SEQ ID NO: 86913 - DNA, 15 bp, Homo sapiens
tgtatcttagaatta

SEQ ID NO: 86914 - DNA, 15 bp, Homo sapiens
gtatcttagaattat

SEQ ID NO: 86915 - DNA, 15 bp, Homo sapiens
tatcttagaattatt

SEQ ID NO: 86916 - DNA, 15 bp, Homo sapiens
atcttagaattattt

SEQ ID NO: 86917 - DNA, 15 bp, Homo sapiens
tcttagaattatttg

SEQ ID NO: 86918 - DNA, 15 bp, Homo sapiens
cttagaattatttgg

SEQ ID NO: 86919 - DNA, 15 bp, Homo sapiens
ttagaattatttggt

SEQ ID NO: 86920 - DNA, 15 bp, Homo sapiens
tagaattatttggtt

SEQ ID NO: 86921 - DNA, 15 bp, Homo sapiens
agaattatttggttt

SEQ ID NO: 86922 - DNA, 15 bp, Homo sapiens
gaattatttggtttg

SEQ ID NO: 86923 - DNA, 15 bp, Homo sapiens
aattatttggtttgt

SEQ ID NO: 86924 - DNA, 15 bp, Homo sapiens
attatttggtttgtt

SEQ ID NO: 86925 - DNA, 15 bp, Homo sapiens
ttatttggtttgttt

SEQ ID NO: 86926 - DNA, 15 bp, Homo sapiens
tatttggtttgtttc

SEQ ID NO: 86927 - DNA, 15 bp, Homo sapiens
atttggtttgtttca

SEQ ID NO: 86928 - DNA, 15 bp, Homo sapiens
tttggtttgtttcat

SEQ ID NO: 86929 - DNA, 15 bp, Homo sapiens
ttggtttgtttcatt

SEQ ID NO: 86930 - DNA, 15 bp, Homo sapiens
tggtttgtttcattt

SEQ ID NO: 86931 - DNA, 15 bp, Homo sapiens
ggtttgtttcatttt

SEQ ID NO: 86932 - DNA, 15 bp, Homo sapiens
gtttgtttcattttt

SEQ ID NO: 86933 - DNA, 15 bp, Homo sapiens
tttgtttcatttttg

SEQ ID NO: 86934 - DNA, 15 bp, Homo sapiens
ttgtttcatttttgc

SEQ ID NO: 86935 - DNA, 15 bp, Homo sapiens
tgtttcatttttgcc

SEQ ID NO: 86936 - DNA, 15 bp, Homo sapiens
gtttcatttttgcct

SEQ ID NO: 86937 - DNA, 15 bp, Homo sapiens
tttcatttttgccta

SEQ ID NO: 86938 - DNA, 15 bp, Homo sapiens
ttcatttttgcctat

SEQ ID NO: 86939 - DNA, 15 bp, Homo sapiens
tcatttttgcctatg

SEQ ID NO: 86940 - DNA, 15 bp, Homo sapiens
catttttgcctatgt

SEQ ID NO: 86941 - DNA, 15 bp, Homo sapiens
atttttgcctatgtg

SEQ ID NO: 86942 - DNA, 15 bp, Homo sapiens
tttttgcctatgtgt

SEQ ID NO: 86943 - DNA, 15 bp, Homo sapiens
ttttgcctatgtgtg

SEQ ID NO: 86944 - DNA, 15 bp, Homo sapiens
tttgcctatgtgtga

SEQ ID NO: 86945 - DNA, 15 bp, Homo sapiens
ttgcctatgtgtgat

SEQ ID NO: 86946 - DNA, 15 bp, Homo sapiens
tgcctatgtgtgata

SEQ ID NO: 86947 - DNA, 15 bp, Homo sapiens
gcctatgtgtgatat

SEQ ID NO: 86948 - DNA, 15 bp, Homo sapiens
cctatgtgtgatata

SEQ ID NO: 86949 - DNA, 15 bp, Homo sapiens
ctatgtgtgatatat

SEQ ID NO: 86950 - DNA, 15 bp, Homo sapiens
tatgtgtgatatatg

SEQ ID NO: 86951 - DNA, 15 bp, Homo sapiens
atgtgtgatatatgt

SEQ ID NO: 86952 - DNA, 15 bp, Homo sapiens
tgtgtgatatatgta

SEQ ID NO: 86953 - DNA, 15 bp, Homo sapiens
gtgtgatatatgtat

SEQ ID NO: 86954 - DNA, 15 bp, Homo sapiens
tgtgatatatgtatt

SEQ ID NO: 86955 - DNA, 15 bp, Homo sapiens
gtgatatatgtattt

SEQ ID NO: 86956 - DNA, 15 bp, Homo sapiens
tgatatatgtatttc

SEQ ID NO: 86957 - DNA, 15 bp, Homo sapiens
gatatatgtatttct

SEQ ID NO: 86958 - DNA, 15 bp, Homo sapiens
atatatgtatttcta

SEQ ID NO: 86959 - DNA, 15 bp, Homo sapiens
tatatgtatttctac

SEQ ID NO: 86960 - DNA, 15 bp, Homo sapiens
atatgtatttctaca

SEQ ID NO: 86961 - DNA, 15 bp, Homo sapiens
tatgtatttctacat

SEQ ID NO: 86962 - DNA, 15 bp, Homo sapiens
atgtatttctacata

SEQ ID NO: 86963 - DNA, 15 bp, Homo sapiens
tgtatttctacatag

SEQ ID NO: 86964 - DNA, 15 bp, Homo sapiens
gtatttctacatagg

SEQ ID NO: 86965 - DNA, 15 bp, Homo sapiens
tatttctacataggt

SEQ ID NO: 86966 - DNA, 15 bp, Homo sapiens
atttctacataggta

SEQ ID NO: 86967 - DNA, 15 bp, Homo sapiens
tttctacataggtat

SEQ ID NO: 86968 - DNA, 15 bp, Homo sapiens
ttctacataggtata

SEQ ID NO: 86969 - DNA, 15 bp, Homo sapiens
tctacataggtatat

SEQ ID NO: 86970 - DNA, 15 bp, Homo sapiens
ctacataggtatata

SEQ ID NO: 86971 - DNA, 15 bp, Homo sapiens
tacataggtatatat

SEQ ID NO: 86972 - DNA, 15 bp, Homo sapiens
acataggtatatata

SEQ ID NO: 86973 - DNA, 15 bp, Homo sapiens
cataggtatatatat

SEQ ID NO: 86974 - DNA, 15 bp, Homo sapiens
ataggtatatatatc

SEQ ID NO: 86975 - DNA, 15 bp, Homo sapiens
taggtatatatatct

SEQ ID NO: 86976 - DNA, 15 bp, Homo sapiens
aggtatatatatcta

SEQ ID NO: 86977 - DNA, 15 bp, Homo sapiens
ggtatatatatctac

SEQ ID NO: 86978 - DNA, 15 bp, Homo sapiens
gtatatatatctact

SEQ ID NO: 86979 - DNA, 15 bp, Homo sapiens
tatatatatctactt

SEQ ID NO: 86980 - DNA, 15 bp, Homo sapiens
atatatatctactta

SEQ ID NO: 86981 - DNA, 15 bp, Homo sapiens
tatatatctacttat

SEQ ID NO: 86982 - DNA, 15 bp, Homo sapiens
atatatctacttata

SEQ ID NO: 86983 - DNA, 15 bp, Homo sapiens
tatatctacttatag

SEQ ID NO: 86984 - DNA, 15 bp, Homo sapiens
atatctacttataga

SEQ ID NO: 86985 - DNA, 15 bp, Homo sapiens
tatctacttatagac

SEQ ID NO: 86986 - DNA, 15 bp, Homo sapiens
atctacttatagaca

SEQ ID NO: 86987 - DNA, 15 bp, Homo sapiens
tctacttatagacaa

SEQ ID NO: 86988 - DNA, 15 bp, Homo sapiens
ctacttatagacaag

SEQ ID NO: 86989 - DNA, 15 bp, Homo sapiens
tacttatagacaaga

SEQ ID NO: 86990 - DNA, 15 bp, Homo sapiens
acttatagacaagaa

SEQ ID NO: 86991 - DNA, 15 bp, Homo sapiens
cttatagacaagaat

SEQ ID NO: 86992 - DNA, 15 bp, Homo sapiens
ttatagacaagaatt

SEQ ID NO: 86993 - DNA, 15 bp, Homo sapiens
tatagacaagaattc

SEQ ID NO: 86994 - DNA, 15 bp, Homo sapiens
atagacaagaattct

SEQ ID NO: 86995 - DNA, 15 bp, Homo sapiens
tagacaagaattctt

SEQ ID NO: 86996 - DNA, 15 bp, Homo sapiens
agacaagaattcttc

SEQ ID NO: 86997 - DNA, 15 bp, Homo sapiens
gacaagaattcttca

SEQ ID NO: 86998 - DNA, 15 bp, Homo sapiens
acaagaattcttcag

SEQ ID NO: 86999 - DNA, 15 bp, Homo sapiens
caagaattcttcaga

SEQ ID NO: 87000 - DNA, 15 bp, Homo sapiens
aagaattcttcagat

SEQ ID NO: 87001 - DNA, 15 bp, Homo sapiens
agaattcttcagatt

SEQ ID NO: 87002 - DNA, 15 bp, Homo sapiens
gaattcttcagatta

SEQ ID NO: 87003 - DNA, 15 bp, Homo sapiens
aattcttcagattaa

SEQ ID NO: 87004 - DNA, 15 bp, Homo sapiens
attcttcagattaaa

SEQ ID NO: 87005 - DNA, 15 bp, Homo sapiens
ttcttcagattaaaa

SEQ ID NO: 87006 - DNA, 15 bp, Homo sapiens
tcttcagattaaaaa

SEQ ID NO: 87007 - DNA, 15 bp, Homo sapiens
cttcagattaaaaaa

SEQ ID NO: 87008 - DNA, 15 bp, Homo sapiens
ttcagattaaaaaaa

SEQ ID NO: 87009 - DNA, 15 bp, Homo sapiens
tcagattaaaaaaat

SEQ ID NO: 87010 - DNA, 15 bp, Homo sapiens
cagattaaaaaaatc

SEQ ID NO: 87011 - DNA, 15 bp, Homo sapiens
agattaaaaaaatct

SEQ ID NO: 87012 - DNA, 15 bp, Homo sapiens
gattaaaaaaatctg

SEQ ID NO: 87013 - DNA, 15 bp, Homo sapiens
attaaaaaaatctga

SEQ ID NO: 87014 - DNA, 15 bp, Homo sapiens
ttaaaaaaatctgat

SEQ ID NO: 87015 - DNA, 15 bp, Homo sapiens
taaaaaaatctgatt

SEQ ID NO: 87016 - DNA, 15 bp, Homo sapiens
aaaaaaatctgattt

SEQ ID NO: 87017 - DNA, 15 bp, Homo sapiens
aaaaaatctgatttg

SEQ ID NO: 87018 - DNA, 15 bp, Homo sapiens
aaaaatctgatttgt

SEQ ID NO: 87019 - DNA, 15 bp, Homo sapiens
aaaatctgatttgta

SEQ ID NO: 87020 - DNA, 15 bp, Homo sapiens
aaatctgatttgtaa

SEQ ID NO: 87021 - DNA, 15 bp, Homo sapiens
aatctgatttgtaaa

SEQ ID NO: 87022 - DNA, 15 bp, Homo sapiens
atctgatttgtaaac

SEQ ID NO: 87023 - DNA, 15 bp, Homo sapiens
tctgatttgtaaaca

SEQ ID NO: 87024 - DNA, 15 bp, Homo sapiens
ctgatttgtaaacat

SEQ ID NO: 87025 - DNA, 15 bp, Homo sapiens
tgatttgtaaacatt

SEQ ID NO: 87026 - DNA, 15 bp, Homo sapiens
gatttgtaaacattc

SEQ ID NO: 87027 - DNA, 15 bp, Homo sapiens
atttgtaaacattcc

SEQ ID NO: 87028 - DNA, 15 bp, Homo sapiens
tttgtaaacattccc

SEQ ID NO: 87029 - DNA, 15 bp, Homo sapiens
ttgtaaacattccca

SEQ ID NO: 87030 - DNA, 15 bp, Homo sapiens
tgtaaacattcccaa

SEQ ID NO: 87031 - DNA, 15 bp, Homo sapiens
gtaaacattcccaag

SEQ ID NO: 87032 - DNA, 15 bp, Homo sapiens
taaacattcccaagt

SEQ ID NO: 87033 - DNA, 15 bp, Homo sapiens
aaacattcccaagtg

SEQ ID NO: 87034 - DNA, 15 bp, Homo sapiens
aacattcccaagtgg

SEQ ID NO: 87035 - DNA, 15 bp, Homo sapiens
acattcccaagtggt

SEQ ID NO: 87036 - DNA, 15 bp, Homo sapiens
cattcccaagtggtt

SEQ ID NO: 87037 - DNA, 15 bp, Homo sapiens
attcccaagtggttg

SEQ ID NO: 87038 - DNA, 15 bp, Homo sapiens
ttcccaagtggttgt

SEQ ID NO: 87039 - DNA, 15 bp, Homo sapiens
tcccaagtggttgtt

SEQ ID NO: 87040 - DNA, 15 bp, Homo sapiens
cccaagtggttgttt

SEQ ID NO: 87041 - DNA, 15 bp, Homo sapiens
ccaagtggttgttta

SEQ ID NO: 87042 - DNA, 15 bp, Homo sapiens
caagtggttgtttac

SEQ ID NO: 87043 - DNA, 15 bp, Homo sapiens
aagtggttgtttacc

SEQ ID NO: 87044 - DNA, 15 bp, Homo sapiens
agtggttgtttacca

SEQ ID NO: 87045 - DNA, 15 bp, Homo sapiens
gtggttgtttaccat

SEQ ID NO: 87046 - DNA, 15 bp, Homo sapiens
tggttgtttaccatt

SEQ ID NO: 87047 - DNA, 15 bp, Homo sapiens
ggttgtttaccattt

SEQ ID NO: 87048 - DNA, 15 bp, Homo sapiens
gttgtttaccatttt

SEQ ID NO: 87049 - DNA, 15 bp, Homo sapiens
ttgtttaccattttt

SEQ ID NO: 87050 - DNA, 15 bp, Homo sapiens
tgtttaccatttttt

SEQ ID NO: 87051 - DNA, 15 bp, Homo sapiens
gtttaccattttttt

SEQ ID NO: 87052 - DNA, 15 bp, Homo sapiens
tttaccatttttttc

SEQ ID NO: 87053 - DNA, 15 bp, Homo sapiens
ttaccatttttttct

SEQ ID NO: 87054 - DNA, 15 bp, Homo sapiens
taccatttttttctt

SEQ ID NO: 87055 - DNA, 15 bp, Homo sapiens
accatttttttcttc

SEQ ID NO: 87056 - DNA, 15 bp, Homo sapiens
ccatttttttcttcc

SEQ ID NO: 87057 - DNA, 15 bp, Homo sapiens
catttttttcttccc

SEQ ID NO: 87058 - DNA, 15 bp, Homo sapiens
atttttttcttcccc

SEQ ID NO: 87059 - DNA, 15 bp, Homo sapiens
tttttttcttccccc

SEQ ID NO: 87060 - DNA, 15 bp, Homo sapiens
ttttttcttccccct

SEQ ID NO: 87061 - DNA, 15 bp, Homo sapiens
tttttcttccccctt

SEQ ID NO: 87062 - DNA, 15 bp, Homo sapiens
ttttcttcccccttc

SEQ ID NO: 87063 - DNA, 15 bp, Homo sapiens
tttcttcccccttcc

SEQ ID NO: 87064 - DNA, 15 bp, Homo sapiens
ttcttcccccttcct

SEQ ID NO: 87065 - DNA, 15 bp, Homo sapiens
tcttcccccttccta

SEQ ID NO: 87066 - DNA, 15 bp, Homo sapiens
cttcccccttcctat

SEQ ID NO: 87067 - DNA, 15 bp, Homo sapiens
ttcccccttcctatt

SEQ ID NO: 87068 - DNA, 15 bp, Homo sapiens
tcccccttcctattt

SEQ ID NO: 87069 - DNA, 15 bp, Homo sapiens
cccccttcctatttc

SEQ ID NO: 87070 - DNA, 15 bp, Homo sapiens
ccccttcctatttct

SEQ ID NO: 87071 - DNA, 15 bp, Homo sapiens
cccttcctatttctt

SEQ ID NO: 87072 - DNA, 15 bp, Homo sapiens
ccttcctatttctta

SEQ ID NO: 87073 - DNA, 15 bp, Homo sapiens
cttcctatttcttat

SEQ ID NO: 87074 - DNA, 15 bp, Homo sapiens
ttcctatttcttatt

SEQ ID NO: 87075 - DNA, 15 bp, Homo sapiens
tcctatttcttattc

SEQ ID NO: 87076 - DNA, 15 bp, Homo sapiens
cctatttcttattct

SEQ ID NO: 87077 - DNA, 15 bp, Homo sapiens
ctatttcttattcta

SEQ ID NO: 87078 - DNA, 15 bp, Homo sapiens
tatttcttattctac

SEQ ID NO: 87079 - DNA, 15 bp, Homo sapiens
atttcttattctacc

SEQ ID NO: 87080 - DNA, 15 bp, Homo sapiens
tttcttattctacct

SEQ ID NO: 87081 - DNA, 15 bp, Homo sapiens
ttcttattctacctg

SEQ ID NO: 87082 - DNA, 15 bp, Homo sapiens
tcttattctacctga

SEQ ID NO: 87083 - DNA, 15 bp, Homo sapiens
cttattctacctgat

SEQ ID NO: 87084 - DNA, 15 bp, Homo sapiens
ttattctacctgatt

SEQ ID NO: 87085 - DNA, 15 bp, Homo sapiens
tattctacctgattt

SEQ ID NO: 87086 - DNA, 15 bp, Homo sapiens
attctacctgatttt

SEQ ID NO: 87087 - DNA, 15 bp, Homo sapiens
ttctacctgattttc

SEQ ID NO: 87088 - DNA, 15 bp, Homo sapiens
tctacctgattttcc

SEQ ID NO: 87089 - DNA, 15 bp, Homo sapiens
ctacctgattttccc

SEQ ID NO: 87090 - DNA, 15 bp, Homo sapiens
tacctgattttcccc

SEQ ID NO: 87091 - DNA, 15 bp, Homo sapiens
acctgattttcccct

SEQ ID NO: 87092 - DNA, 15 bp, Homo sapiens
cctgattttcccctg

SEQ ID NO: 87093 - DNA, 15 bp, Homo sapiens
ctgattttcccctgt

SEQ ID NO: 87094 - DNA, 15 bp, Homo sapiens
tgattttcccctgtt

SEQ ID NO: 87095 - DNA, 15 bp, Homo sapiens
gattttcccctgttc

SEQ ID NO: 87096 - DNA, 15 bp, Homo sapiens
attttcccctgttca

SEQ ID NO: 87097 - DNA, 15 bp, Homo sapiens
ttttcccctgttcat

SEQ ID NO: 87098 - DNA, 15 bp, Homo sapiens
tttcccctgttcatt

SEQ ID NO: 87099 - DNA, 15 bp, Homo sapiens
ttcccctgttcattc

SEQ ID NO: 87100 - DNA, 15 bp, Homo sapiens
tcccctgttcattca

SEQ ID NO: 87101 - DNA, 15 bp, Homo sapiens
cccctgttcattcac

SEQ ID NO: 87102 - DNA, 15 bp, Homo sapiens
ccctgttcattcacc

SEQ ID NO: 87103 - DNA, 15 bp, Homo sapiens
cctgttcattcacca

SEQ ID NO: 87104 - DNA, 15 bp, Homo sapiens
ctgttcattcaccac

SEQ ID NO: 87105 - DNA, 15 bp, Homo sapiens
tgttcattcaccaca

SEQ ID NO: 87106 - DNA, 15 bp, Homo sapiens
gttcattcaccacac

SEQ ID NO: 87107 - DNA, 15 bp, Homo sapiens
ttcattcaccacact

SEQ ID NO: 87108 - DNA, 15 bp, Homo sapiens
tcattcaccacactc

SEQ ID NO: 87109 - DNA, 15 bp, Homo sapiens
cattcaccacactcg

SEQ ID NO: 87110 - DNA, 15 bp, Homo sapiens
attcaccacactcgt

SEQ ID NO: 87111 - DNA, 15 bp, Homo sapiens
ttcaccacactcgtt

SEQ ID NO: 87112 - DNA, 15 bp, Homo sapiens
tcaccacactcgttt

SEQ ID NO: 87113 - DNA, 15 bp, Homo sapiens
caccacactcgtttc

SEQ ID NO: 87114 - DNA, 15 bp, Homo sapiens
accacactcgtttct

SEQ ID NO: 87115 - DNA, 15 bp, Homo sapiens
ccacactcgtttctt

SEQ ID NO: 87116 - DNA, 15 bp, Homo sapiens
cacactcgtttcttt

SEQ ID NO: 87117 - DNA, 15 bp, Homo sapiens
acactcgtttctttc

SEQ ID NO: 87118 - DNA, 15 bp, Homo sapiens
cactcgtttctttct

SEQ ID NO: 87119 - DNA, 15 bp, Homo sapiens
actcgtttctttctc

SEQ ID NO: 87120 - DNA, 15 bp, Homo sapiens
ctcgtttctttctct

SEQ ID NO: 87121 - DNA, 15 bp, Homo sapiens
tcgtttctttctctt

SEQ ID NO: 87122 - DNA, 15 bp, Homo sapiens
cgtttctttctcttt

SEQ ID NO: 87123 - DNA, 15 bp, Homo sapiens
gtttctttctctttt

SEQ ID NO: 87124 - DNA, 15 bp, Homo sapiens
tttctttctcttttt

SEQ ID NO: 87125 - DNA, 15 bp, Homo sapiens
ttctttctctttttt

SEQ ID NO: 87126 - DNA, 15 bp, Homo sapiens
tctttctctttttta

SEQ ID NO: 87127 - DNA, 15 bp, Homo sapiens
ctttctcttttttac

SEQ ID NO: 87128 - DNA, 15 bp, Homo sapiens
tttctcttttttact

SEQ ID NO: 87129 - DNA, 15 bp, Homo sapiens
ttctcttttttactc

SEQ ID NO: 87130 - DNA, 15 bp, Homo sapiens
tctcttttttactct

SEQ ID NO: 87131 - DNA, 15 bp, Homo sapiens
ctcttttttactctc

SEQ ID NO: 87132 - DNA, 15 bp, Homo sapiens
tcttttttactctct

SEQ ID NO: 87133 - DNA, 15 bp, Homo sapiens
cttttttactctctc

SEQ ID NO: 87134 - DNA, 15 bp, Homo sapiens
ttttttactctctct

SEQ ID NO: 87135 - DNA, 15 bp, Homo sapiens
tttttactctctctt

SEQ ID NO: 87136 - DNA, 15 bp, Homo sapiens
ttttactctctctta

SEQ ID NO: 87137 - DNA, 15 bp, Homo sapiens
tttactctctcttaa

SEQ ID NO: 87138 - DNA, 15 bp, Homo sapiens
ttactctctcttaat

SEQ ID NO: 87139 - DNA, 15 bp, Homo sapiens
tactctctcttaatt

SEQ ID NO: 87140 - DNA, 15 bp, Homo sapiens
actctctcttaattt

SEQ ID NO: 87141 - DNA, 15 bp, Homo sapiens
ctctctcttaatttt

SEQ ID NO: 87142 - DNA, 15 bp, Homo sapiens
tctctcttaattttt

SEQ ID NO: 87143 - DNA, 15 bp, Homo sapiens
ctctcttaatttttc

SEQ ID NO: 87144 - DNA, 15 bp, Homo sapiens
tctcttaatttttca

SEQ ID NO: 87145 - DNA, 15 bp, Homo sapiens
ctcttaatttttcat

SEQ ID NO: 87146 - DNA, 15 bp, Homo sapiens
tcttaatttttcatt

SEQ ID NO: 87147 - DNA, 15 bp, Homo sapiens
cttaatttttcattc

SEQ ID NO: 87148 - DNA, 15 bp, Homo sapiens
ttaatttttcattca

SEQ ID NO: 87149 - DNA, 15 bp, Homo sapiens
taatttttcattcaa

SEQ ID NO: 87150 - DNA, 15 bp, Homo sapiens
aatttttcattcaat

SEQ ID NO: 87151 - DNA, 15 bp, Homo sapiens
atttttcattcaatt

SEQ ID NO: 87152 - DNA, 15 bp, Homo sapiens
tttttcattcaattt

SEQ ID NO: 87153 - DNA, 15 bp, Homo sapiens
ttttcattcaatttt

SEQ ID NO: 87154 - DNA, 15 bp, Homo sapiens
tttcattcaattttt

SEQ ID NO: 87155 - DNA, 15 bp, Homo sapiens
ttcattcaattttta

SEQ ID NO: 87156 - DNA, 15 bp, Homo sapiens
tcattcaatttttat

SEQ ID NO: 87157 - DNA, 15 bp, Homo sapiens
cattcaatttttata

SEQ ID NO: 87158 - DNA, 15 bp, Homo sapiens
attcaatttttataa

SEQ ID NO: 87159 - DNA, 15 bp, Homo sapiens
ttcaatttttataac

SEQ ID NO: 87160 - DNA, 15 bp, Homo sapiens
tcaatttttataaca

SEQ ID NO: 87161 - DNA, 15 bp, Homo sapiens
caatttttataacat

SEQ ID NO: 87162 - DNA, 15 bp, Homo sapiens
aatttttataacatg

SEQ ID NO: 87163 - DNA, 15 bp, Homo sapiens
atttttataacatgt

SEQ ID NO: 87164 - DNA, 15 bp, Homo sapiens
tttttataacatgta

SEQ ID NO: 87165 - DNA, 15 bp, Homo sapiens
ttttataacatgtaa

SEQ ID NO: 87166 - DNA, 15 bp, Homo sapiens
tttataacatgtaat

SEQ ID NO: 87167 - DNA, 15 bp, Homo sapiens
ttataacatgtaata

SEQ ID NO: 87168 - DNA, 15 bp, Homo sapiens
tataacatgtaataa

SEQ ID NO: 87169 - DNA, 15 bp, Homo sapiens
ataacatgtaataaa

SEQ ID NO: 87170 - DNA, 15 bp, Homo sapiens
taacatgtaataaat

SEQ ID NO: 87171 - DNA, 15 bp, Homo sapiens
aacatgtaataaatc

SEQ ID NO: 87172 - DNA, 15 bp, Homo sapiens
acatgtaataaatct

SEQ ID NO: 87173 - DNA, 15 bp, Homo sapiens
catgtaataaatcta

SEQ ID NO: 87174 - DNA, 15 bp, Homo sapiens
atgtaataaatctaa

SEQ ID NO: 87175 - DNA, 15 bp, Homo sapiens
tgtaataaatctaac

SEQ ID NO: 87176 - DNA, 15 bp, Homo sapiens
gtaataaatctaact

SEQ ID NO: 87177 - DNA, 15 bp, Homo sapiens
taataaatctaactg

SEQ ID NO: 87178 - DNA, 15 bp, Homo sapiens
aataaatctaactgt

SEQ ID NO: 87179 - DNA, 15 bp, Homo sapiens
ataaatctaactgta

SEQ ID NO: 87180 - DNA, 15 bp, Homo sapiens
taaatctaactgtag

SEQ ID NO: 87181 - DNA, 15 bp, Homo sapiens
aaatctaactgtagc

SEQ ID NO: 87182 - DNA, 15 bp, Homo sapiens
aatctaactgtagcg

SEQ ID NO: 87183 - DNA, 15 bp, Homo sapiens
atctaactgtagcgt

SEQ ID NO: 87184 - DNA, 15 bp, Homo sapiens
tctaactgtagcgtc

SEQ ID NO: 87185 - DNA, 15 bp, Homo sapiens
ctaactgtagcgtct

SEQ ID NO: 87186 - DNA, 15 bp, Homo sapiens
taactgtagcgtctg

SEQ ID NO: 87187 - DNA, 15 bp, Homo sapiens
aactgtagcgtctga

SEQ ID NO: 87188 - DNA, 15 bp, Homo sapiens
actgtagcgtctgag

SEQ ID NO: 87189 - DNA, 15 bp, Homo sapiens
ctgtagcgtctgagt

SEQ ID NO: 87190 - DNA, 15 bp, Homo sapiens
tgtagcgtctgagta

SEQ ID NO: 87191 - DNA, 15 bp, Homo sapiens
gtagcgtctgagtat

SEQ ID NO: 87192 - DNA, 15 bp, Homo sapiens
tagcgtctgagtatt

SEQ ID NO: 87193 - DNA, 15 bp, Homo sapiens
agcgtctgagtatta

SEQ ID NO: 87194 - DNA, 15 bp, Homo sapiens
gcgtctgagtattaa

SEQ ID NO: 87195 - DNA, 15 bp, Homo sapiens
cgtctgagtattaag

SEQ ID NO: 87196 - DNA, 15 bp, Homo sapiens
gtctgagtattaaga

SEQ ID NO: 87197 - DNA, 15 bp, Homo sapiens
tctgagtattaagaa

SEQ ID NO: 87198 - DNA, 15 bp, Homo sapiens
ctgagtattaagaat

SEQ ID NO: 87199 - DNA, 15 bp, Homo sapiens
tgagtattaagaata

SEQ ID NO: 87200 - DNA, 15 bp, Homo sapiens
gagtattaagaatat

SEQ ID NO: 87201 - DNA, 15 bp, Homo sapiens
agtattaagaatatt

SEQ ID NO: 87202 - DNA, 15 bp, Homo sapiens
gtattaagaatattg

SEQ ID NO: 87203 - DNA, 15 bp, Homo sapiens
tattaagaatattgc

SEQ ID NO: 87204 - DNA, 15 bp, Homo sapiens
attaagaatattgct

SEQ ID NO: 87205 - DNA, 15 bp, Homo sapiens
ttaagaatattgcta

SEQ ID NO: 87206 - DNA, 15 bp, Homo sapiens
taagaatattgctag

SEQ ID NO: 87207 - DNA, 15 bp, Homo sapiens
aagaatattgctagt

SEQ ID NO: 87208 - DNA, 15 bp, Homo sapiens
agaatattgctagta

SEQ ID NO: 87209 - DNA, 15 bp, Homo sapiens
gaatattgctagtaa

SEQ ID NO: 87210 - DNA, 15 bp, Homo sapiens
aatattgctagtaat

SEQ ID NO: 87211 - DNA, 15 bp, Homo sapiens
atattgctagtaata

SEQ ID NO: 87212 - DNA, 15 bp, Homo sapiens
tattgctagtaatac

SEQ ID NO: 87213 - DNA, 15 bp, Homo sapiens
attgctagtaatact

SEQ ID NO: 87214 - DNA, 15 bp, Homo sapiens
ttgctagtaatactt

SEQ ID NO: 87215 - DNA, 15 bp, Homo sapiens
tgctagtaatacttc

SEQ ID NO: 87216 - DNA, 15 bp, Homo sapiens
gctagtaatacttca

SEQ ID NO: 87217 - DNA, 15 bp, Homo sapiens
ctagtaatacttcac

SEQ ID NO: 87218 - DNA, 15 bp, Homo sapiens
tagtaatacttcacc

SEQ ID NO: 87219 - DNA, 15 bp, Homo sapiens
agtaatacttcacct

SEQ ID NO: 87220 - DNA, 15 bp, Homo sapiens
gtaatacttcacctg

SEQ ID NO: 87221 - DNA, 15 bp, Homo sapiens
taatacttcacctgt

SEQ ID NO: 87222 - DNA, 15 bp, Homo sapiens
aatacttcacctgta

SEQ ID NO: 87223 - DNA, 15 bp, Homo sapiens
atacttcacctgtaa

SEQ ID NO: 87224 - DNA, 15 bp, Homo sapiens
tacttcacctgtaat

SEQ ID NO: 87225 - DNA, 15 bp, Homo sapiens
acttcacctgtaatc

SEQ ID NO: 87226 - DNA, 15 bp, Homo sapiens
cttcacctgtaatcc

SEQ ID NO: 87227 - DNA, 15 bp, Homo sapiens
ttcacctgtaatccc

SEQ ID NO: 87228 - DNA, 15 bp, Homo sapiens
tcacctgtaatccca

SEQ ID NO: 87229 - DNA, 15 bp, Homo sapiens
cacctgtaatcccag

SEQ ID NO: 87230 - DNA, 15 bp, Homo sapiens
cactttgggaggcta

SEQ ID NO: 87231 - DNA, 15 bp, Homo sapiens
actttgggaggctaa

SEQ ID NO: 87232 - DNA, 15 bp, Homo sapiens
ctttgggaggctaag

SEQ ID NO: 87233 - DNA, 15 bp, Homo sapiens
tttgggaggctaagg

SEQ ID NO: 87234 - DNA, 15 bp, Homo sapiens
ttgggaggctaaggc

SEQ ID NO: 87235 - DNA, 15 bp, Homo sapiens
tgggaggctaaggca

SEQ ID NO: 87236 - DNA, 15 bp, Homo sapiens
gggaggctaaggcag

SEQ ID NO: 87237 - DNA, 15 bp, Homo sapiens
ggaggctaaggcagg

SEQ ID NO: 87238 - DNA, 15 bp, Homo sapiens
gaggctaaggcaggc

SEQ ID NO: 87239 - DNA, 15 bp, Homo sapiens
aggctaaggcaggcg

SEQ ID NO: 87240 - DNA, 15 bp, Homo sapiens
ggctaaggcaggcgg

SEQ ID NO: 87241 - DNA, 15 bp, Homo sapiens
gctaaggcaggcgga

SEQ ID NO: 87242 - DNA, 15 bp, Homo sapiens
ctaaggcaggcggat

SEQ ID NO: 87243 - DNA, 15 bp, Homo sapiens
taaggcaggcggatc

SEQ ID NO: 87244 - DNA, 15 bp, Homo sapiens
aaggcaggcggatca

SEQ ID NO: 87245 - DNA, 15 bp, Homo sapiens
aggcaggcggatcac

SEQ ID NO: 87246 - DNA, 15 bp, Homo sapiens
ggcaggcggatcact

SEQ ID NO: 87247 - DNA, 15 bp, Homo sapiens
gcaggcggatcactt

SEQ ID NO: 87248 - DNA, 15 bp, Homo sapiens
caggcggatcacttg

SEQ ID NO: 87249 - DNA, 15 bp, Homo sapiens
aggcggatcacttga

SEQ ID NO: 87250 - DNA, 15 bp, Homo sapiens
ggcggatcacttgag

SEQ ID NO: 87251 - DNA, 15 bp, Homo sapiens
gcggatcacttgagg

SEQ ID NO: 87252 - DNA, 15 bp, Homo sapiens
cggatcacttgaggc

SEQ ID NO: 87253 - DNA, 15 bp, Homo sapiens
ggatcacttgaggcc

SEQ ID NO: 87254 - DNA, 15 bp, Homo sapiens
gatcacttgaggccc

SEQ ID NO: 87255 - DNA, 15 bp, Homo sapiens
atcacttgaggccca

SEQ ID NO: 87256 - DNA, 15 bp, Homo sapiens
tcacttgaggcccag

SEQ ID NO: 87257 - DNA, 15 bp, Homo sapiens
cacttgaggcccagg

SEQ ID NO: 87258 - DNA, 15 bp, Homo sapiens
acttgaggcccagga

SEQ ID NO: 87259 - DNA, 15 bp, Homo sapiens
cttgaggcccaggag

SEQ ID NO: 87260 - DNA, 15 bp, Homo sapiens
ttgaggcccaggagt

SEQ ID NO: 87261 - DNA, 15 bp, Homo sapiens
tgaggcccaggagtt

SEQ ID NO: 87262 - DNA, 15 bp, Homo sapiens
gaggcccaggagttt

SEQ ID NO: 87263 - DNA, 15 bp, Homo sapiens
aggcccaggagttta

SEQ ID NO: 87264 - DNA, 15 bp, Homo sapiens
ggcccaggagtttaa

SEQ ID NO: 87265 - DNA, 15 bp, Homo sapiens
gcccaggagtttaag

SEQ ID NO: 87266 - DNA, 15 bp, Homo sapiens
cccaggagtttaaga

SEQ ID NO: 87267 - DNA, 15 bp, Homo sapiens
ccaggagtttaagac

SEQ ID NO: 87268 - DNA, 15 bp, Homo sapiens
caggagtttaagacc

SEQ ID NO: 87269 - DNA, 15 bp, Homo sapiens
aggagtttaagacca

SEQ ID NO: 87270 - DNA, 15 bp, Homo sapiens
ggagtttaagaccag

SEQ ID NO: 87271 - DNA, 15 bp, Homo sapiens
gagtttaagaccagc

SEQ ID NO: 87272 - DNA, 15 bp, Homo sapiens
agtttaagaccagcc

SEQ ID NO: 87273 - DNA, 15 bp, Homo sapiens
gtttaagaccagccg

SEQ ID NO: 87274 - DNA, 15 bp, Homo sapiens
tttaagaccagccgg

SEQ ID NO: 87275 - DNA, 15 bp, Homo sapiens
ttaagaccagccggc

SEQ ID NO: 87276 - DNA, 15 bp, Homo sapiens
taagaccagccggcc

SEQ ID NO: 87277 - DNA, 15 bp, Homo sapiens
aagaccagccggcca

SEQ ID NO: 87278 - DNA, 15 bp, Homo sapiens
agaccagccggccaa

SEQ ID NO: 87279 - DNA, 15 bp, Homo sapiens
gaccagccggccaat

SEQ ID NO: 87280 - DNA, 15 bp, Homo sapiens
accagccggccaata

SEQ ID NO: 87281 - DNA, 15 bp, Homo sapiens
ccagccggccaatat

SEQ ID NO: 87282 - DNA, 15 bp, Homo sapiens
cagccggccaatatg

SEQ ID NO: 87283 - DNA, 15 bp, Homo sapiens
agccggccaatatgg

SEQ ID NO: 87284 - DNA, 15 bp, Homo sapiens
gccggccaatatggc

SEQ ID NO: 87285 - DNA, 15 bp, Homo sapiens
ccggccaatatggcg

SEQ ID NO: 87286 - DNA, 15 bp, Homo sapiens
cggccaatatggcga

SEQ ID NO: 87287 - DNA, 15 bp, Homo sapiens
ggccaatatggcgaa

SEQ ID NO: 87288 - DNA, 15 bp, Homo sapiens
gccaatatggcgaaa

SEQ ID NO: 87289 - DNA, 15 bp, Homo sapiens
ccaatatggcgaaac

SEQ ID NO: 87290 - DNA, 15 bp, Homo sapiens
caatatggcgaaacc

SEQ ID NO: 87291 - DNA, 15 bp, Homo sapiens
aatatggcgaaaccc

SEQ ID NO: 87292 - DNA, 15 bp, Homo sapiens
atatggcgaaaccct

SEQ ID NO: 87293 - DNA, 15 bp, Homo sapiens
tatggcgaaacccta

SEQ ID NO: 87294 - DNA, 15 bp, Homo sapiens
atggcgaaaccctat

SEQ ID NO: 87295 - DNA, 15 bp, Homo sapiens
tggcgaaaccctatc

SEQ ID NO: 87296 - DNA, 15 bp, Homo sapiens
ggcgaaaccctatct

SEQ ID NO: 87297 - DNA, 15 bp, Homo sapiens
gcgaaaccctatctg

SEQ ID NO: 87298 - DNA, 15 bp, Homo sapiens
cgaaaccctatctgc

SEQ ID NO: 87299 - DNA, 15 bp, Homo sapiens
gaaaccctatctgca

SEQ ID NO: 87300 - DNA, 15 bp, Homo sapiens
aaaccctatctgcac

SEQ ID NO: 87301 - DNA, 15 bp, Homo sapiens
aaccctatctgcact

SEQ ID NO: 87302 - DNA, 15 bp, Homo sapiens
accctatctgcacta

SEQ ID NO: 87303 - DNA, 15 bp, Homo sapiens
ccctatctgcactac

SEQ ID NO: 87304 - DNA, 15 bp, Homo sapiens
cctatctgcactaca

SEQ ID NO: 87305 - DNA, 15 bp, Homo sapiens
ctatctgcactacaa

SEQ ID NO: 87306 - DNA, 15 bp, Homo sapiens
tatctgcactacaaa

SEQ ID NO: 87307 - DNA, 15 bp, Homo sapiens
atctgcactacaaat

SEQ ID NO: 87308 - DNA, 15 bp, Homo sapiens
tctgcactacaaata

SEQ ID NO: 87309 - DNA, 15 bp, Homo sapiens
ctgcactacaaatac

SEQ ID NO: 87310 - DNA, 15 bp, Homo sapiens
tgcactacaaataca

SEQ ID NO: 87311 - DNA, 15 bp, Homo sapiens
gcactacaaatacaa

SEQ ID NO: 87312 - DNA, 15 bp, Homo sapiens
cactacaaatacaaa

SEQ ID NO: 87313 - DNA, 15 bp, Homo sapiens
acaaatacaaaaatt

SEQ ID NO: 87314 - DNA, 15 bp, Homo sapiens
caaatacaaaaatta

SEQ ID NO: 87315 - DNA, 15 bp, Homo sapiens
agctgggcatggtgt

SEQ ID NO: 87316 - DNA, 15 bp, Homo sapiens
gctgggcatggtgtc

SEQ ID NO: 87317 - DNA, 15 bp, Homo sapiens
ctgggcatggtgtcg

SEQ ID NO: 87318 - DNA, 15 bp, Homo sapiens
tgggcatggtgtcgc

SEQ ID NO: 87319 - DNA, 15 bp, Homo sapiens
gggcatggtgtcgca

SEQ ID NO: 87320 - DNA, 15 bp, Homo sapiens
ggcatggtgtcgcac

SEQ ID NO: 87321 - DNA, 15 bp, Homo sapiens
gcatggtgtcgcaca

SEQ ID NO: 87322 - DNA, 15 bp, Homo sapiens
catggtgtcgcacac

SEQ ID NO: 87323 - DNA, 15 bp, Homo sapiens
atggtgtcgcacacc

SEQ ID NO: 87324 - DNA, 15 bp, Homo sapiens
tggtgtcgcacacct

SEQ ID NO: 87325 - DNA, 15 bp, Homo sapiens
ggtgtcgcacacctg

SEQ ID NO: 87326 - DNA, 15 bp, Homo sapiens
gtgtcgcacacctgt

SEQ ID NO: 87327 - DNA, 15 bp, Homo sapiens
tgtcgcacacctgta

SEQ ID NO: 87328 - DNA, 15 bp, Homo sapiens
gtcgcacacctgtaa

SEQ ID NO: 87329 - DNA, 15 bp, Homo sapiens
tcgcacacctgtaat

SEQ ID NO: 87330 - DNA, 15 bp, Homo sapiens
cgcacacctgtaatc

SEQ ID NO: 87331 - DNA, 15 bp, Homo sapiens
gcacacctgtaatcc

SEQ ID NO: 87332 - DNA, 15 bp, Homo sapiens
cacacctgtaatccc

SEQ ID NO: 87333 - DNA, 15 bp, Homo sapiens
acacctgtaatccca

SEQ ID NO: 87334 - DNA, 15 bp, Homo sapiens
gggaggctgaggcac

SEQ ID NO: 87335 - DNA, 15 bp, Homo sapiens
ggaggctgaggcaca

SEQ ID NO: 87336 - DNA, 15 bp, Homo sapiens
gaggctgaggcacaa

SEQ ID NO: 87337 - DNA, 15 bp, Homo sapiens
aggctgaggcacaag

SEQ ID NO: 87338 - DNA, 15 bp, Homo sapiens
ggctgaggcacaaga

SEQ ID NO: 87339 - DNA, 15 bp, Homo sapiens
gctgaggcacaagaa

SEQ ID NO: 87340 - DNA, 15 bp, Homo sapiens
ctgaggcacaagaat

SEQ ID NO: 87341 - DNA, 15 bp, Homo sapiens
tgaggcacaagaatt

SEQ ID NO: 87342 - DNA, 15 bp, Homo sapiens
gaggcacaagaattg

SEQ ID NO: 87343 - DNA, 15 bp, Homo sapiens
aggcacaagaattgc

SEQ ID NO: 87344 - DNA, 15 bp, Homo sapiens
ggcacaagaattgct

SEQ ID NO: 87345 - DNA, 15 bp, Homo sapiens
gcacaagaattgctt

SEQ ID NO: 87346 - DNA, 15 bp, Homo sapiens
cacaagaattgcttg

SEQ ID NO: 87347 - DNA, 15 bp, Homo sapiens
acaagaattgcttga

SEQ ID NO: 87348 - DNA, 15 bp, Homo sapiens
caagaattgcttgag

SEQ ID NO: 87349 - DNA, 15 bp, Homo sapiens
aagaattgcttgagc

SEQ ID NO: 87350 - DNA, 15 bp, Homo sapiens
agaattgcttgagcc

SEQ ID NO: 87351 - DNA, 15 bp, Homo sapiens
gaattgcttgagcct

SEQ ID NO: 87352 - DNA, 15 bp, Homo sapiens
aattgcttgagcctg

SEQ ID NO: 87353 - DNA, 15 bp, Homo sapiens
attgcttgagcctgt

SEQ ID NO: 87354 - DNA, 15 bp, Homo sapiens
ttgcttgagcctgtg

SEQ ID NO: 87355 - DNA, 15 bp, Homo sapiens
tgcttgagcctgtga

SEQ ID NO: 87356 - DNA, 15 bp, Homo sapiens
gcttgagcctgtgag

SEQ ID NO: 87357 - DNA, 15 bp, Homo sapiens
cttgagcctgtgaga

SEQ ID NO: 87358 - DNA, 15 bp, Homo sapiens
ttgagcctgtgagat

SEQ ID NO: 87359 - DNA, 15 bp, Homo sapiens
tgagcctgtgagatg

SEQ ID NO: 87360 - DNA, 15 bp, Homo sapiens
gagcctgtgagatgg

SEQ ID NO: 87361 - DNA, 15 bp, Homo sapiens
agcctgtgagatgga

SEQ ID NO: 87362 - DNA, 15 bp, Homo sapiens
gcctgtgagatggag

SEQ ID NO: 87363 - DNA, 15 bp, Homo sapiens
cctgtgagatggagg

SEQ ID NO: 87364 - DNA, 15 bp, Homo sapiens
ctgtgagatggaggt

SEQ ID NO: 87365 - DNA, 15 bp, Homo sapiens
tgtgagatggaggtt

SEQ ID NO: 87366 - DNA, 15 bp, Homo sapiens
gtgagatggaggttg

SEQ ID NO: 87367 - DNA, 15 bp, Homo sapiens
tgagatggaggttgc

SEQ ID NO: 87368 - DNA, 15 bp, Homo sapiens
gagatggaggttgca

SEQ ID NO: 87369 - DNA, 15 bp, Homo sapiens
agatggaggttgcag

SEQ ID NO: 87370 - DNA, 15 bp, Homo sapiens
gatggaggttgcagt

SEQ ID NO: 87371 - DNA, 15 bp, Homo sapiens
atggaggttgcagtg

SEQ ID NO: 87372 - DNA, 15 bp, Homo sapiens
agtgagccgagatca

SEQ ID NO: 87373 - DNA, 15 bp, Homo sapiens
ccgagatcacaccag

SEQ ID NO: 87374 - DNA, 15 bp, Homo sapiens
cgagatcacaccagt

SEQ ID NO: 87375 - DNA, 15 bp, Homo sapiens
gagatcacaccagtg

SEQ ID NO: 87376 - DNA, 15 bp, Homo sapiens
agatcacaccagtgc

SEQ ID NO: 87377 - DNA, 15 bp, Homo sapiens
gatcacaccagtgca

SEQ ID NO: 87378 - DNA, 15 bp, Homo sapiens
atcacaccagtgcac

SEQ ID NO: 87379 - DNA, 15 bp, Homo sapiens
tcacaccagtgcacg

SEQ ID NO: 87380 - DNA, 15 bp, Homo sapiens
cacaccagtgcacgt

SEQ ID NO: 87381 - DNA, 15 bp, Homo sapiens
acaccagtgcacgtg

SEQ ID NO: 87382 - DNA, 15 bp, Homo sapiens
caccagtgcacgtgc

SEQ ID NO: 87383 - DNA, 15 bp, Homo sapiens
accagtgcacgtgca

SEQ ID NO: 87384 - DNA, 15 bp, Homo sapiens
ccagtgcacgtgcac

SEQ ID NO: 87385 - DNA, 15 bp, Homo sapiens
cagtgcacgtgcact

SEQ ID NO: 87386 - DNA, 15 bp, Homo sapiens
agtgcacgtgcactt

SEQ ID NO: 87387 - DNA, 15 bp, Homo sapiens
gtgcacgtgcacttc

SEQ ID NO: 87388 - DNA, 15 bp, Homo sapiens
tgcacgtgcacttca

SEQ ID NO: 87389 - DNA, 15 bp, Homo sapiens
gcacgtgcacttcag

SEQ ID NO: 87390 - DNA, 15 bp, Homo sapiens
cacgtgcacttcagc

SEQ ID NO: 87391 - DNA, 15 bp, Homo sapiens
acgtgcacttcagcc

SEQ ID NO: 87392 - DNA, 15 bp, Homo sapiens
cgtgcacttcagcct

SEQ ID NO: 87393 - DNA, 15 bp, Homo sapiens
gtgcacttcagcctg

SEQ ID NO: 87394 - DNA, 15 bp, Homo sapiens
tgcacttcagcctgg

SEQ ID NO: 87395 - DNA, 15 bp, Homo sapiens
gcacttcagcctggg

SEQ ID NO: 87396 - DNA, 15 bp, Homo sapiens
cacttcagcctgggc

SEQ ID NO: 87397 - DNA, 15 bp, Homo sapiens
acttcagcctgggca

SEQ ID NO: 87398 - DNA, 15 bp, Homo sapiens
cttcagcctgggcaa

SEQ ID NO: 87399 - DNA, 15 bp, Homo sapiens
ttcagcctgggcaac

SEQ ID NO: 87400 - DNA, 15 bp, Homo sapiens
tcagcctgggcaaca

SEQ ID NO: 87401 - DNA, 15 bp, Homo sapiens
ctgggcaacagagca

SEQ ID NO: 87402 - DNA, 15 bp, Homo sapiens
tgggcaacagagcaa

SEQ ID NO: 87403 - DNA, 15 bp, Homo sapiens
gggcaacagagcaag

SEQ ID NO: 87404 - DNA, 15 bp, Homo sapiens
ggcaacagagcaaga

SEQ ID NO: 87405 - DNA, 15 bp, Homo sapiens
gcaacagagcaagac

SEQ ID NO: 87406 - DNA, 15 bp, Homo sapiens
caacagagcaagact

SEQ ID NO: 87407 - DNA, 15 bp, Homo sapiens
aacagagcaagactc

SEQ ID NO: 87408 - DNA, 15 bp, Homo sapiens
acagagcaagactct

SEQ ID NO: 87409 - DNA, 15 bp, Homo sapiens
cagagcaagactctg

SEQ ID NO: 87410 - DNA, 15 bp, Homo sapiens
agagcaagactctgt

SEQ ID NO: 87411 - DNA, 15 bp, Homo sapiens
gagcaagactctgtc

SEQ ID NO: 87412 - DNA, 15 bp, Homo sapiens
agcaagactctgtct

SEQ ID NO: 87413 - DNA, 15 bp, Homo sapiens
gcaagactctgtctt

SEQ ID NO: 87414 - DNA, 15 bp, Homo sapiens
caagactctgtctta

SEQ ID NO: 87415 - DNA, 15 bp, Homo sapiens
aagactctgtcttaa

SEQ ID NO: 87416 - DNA, 15 bp, Homo sapiens
agactctgtcttaaa

SEQ ID NO: 87417 - DNA, 15 bp, Homo sapiens
gactctgtcttaaaa

SEQ ID NO: 87418 - DNA, 15 bp, Homo sapiens
actctgtcttaaaaa

SEQ ID NO: 87419 - DNA, 15 bp, Homo sapiens
ctctgtcttaaaaaa

SEQ ID NO: 87420 - DNA, 15 bp, Homo sapiens
tctgtcttaaaaaaa

SEQ ID NO: 87421 - DNA, 15 bp, Homo sapiens
tcttaaaaaaaaaaa

SEQ ID NO: 87422 - DNA, 15 bp, Homo sapiens
cttaaaaaaaaaaaa

SEQ ID NO: 87423 - DNA, 15 bp, Homo sapiens
aaaaaaaaaaaatat

SEQ ID NO: 87424 - DNA, 15 bp, Homo sapiens
aaaaaaaaaaatata

SEQ ID NO: 87425 - DNA, 15 bp, Homo sapiens
aaaaaaaaaatatat

SEQ ID NO: 87426 - DNA, 15 bp, Homo sapiens
aaaaaaaaatatata

SEQ ID NO: 87427 - DNA, 15 bp, Homo sapiens
aaaaaaaatatatac

SEQ ID NO: 87428 - DNA, 15 bp, Homo sapiens
aaaaaaatatataca

SEQ ID NO: 87429 - DNA, 15 bp, Homo sapiens
aaaaaatatatacac

SEQ ID NO: 87430 - DNA, 15 bp, Homo sapiens
aaaaatatatacaca

SEQ ID NO: 87431 - DNA, 15 bp, Homo sapiens
aaaatatatacacac

SEQ ID NO: 87432 - DNA, 15 bp, Homo sapiens
aaatatatacacaca

SEQ ID NO: 87433 - DNA, 15 bp, Homo sapiens
aatatatacacacac

SEQ ID NO: 87434 - DNA, 15 bp, Homo sapiens
atatatacacacaca

SEQ ID NO: 87435 - DNA, 15 bp, Homo sapiens
tatatacacacacac

SEQ ID NO: 87436 - DNA, 15 bp, Homo sapiens
atatacacacacaca

SEQ ID NO: 87437 - DNA, 15 bp, Homo sapiens
tatacacacacacac

SEQ ID NO: 87438 - DNA, 15 bp, Homo sapiens
cacacacacacacta

SEQ ID NO: 87439 - DNA, 15 bp, Homo sapiens
acacacacacactat

SEQ ID NO: 87440 - DNA, 15 bp, Homo sapiens
cacacacacactatt

SEQ ID NO: 87441 - DNA, 15 bp, Homo sapiens
acacacacactatta

SEQ ID NO: 87442 - DNA, 15 bp, Homo sapiens
cacacacactattac

SEQ ID NO: 87443 - DNA, 15 bp, Homo sapiens
acacacactattact

SEQ ID NO: 87444 - DNA, 15 bp, Homo sapiens
cacacactattacta

SEQ ID NO: 87445 - DNA, 15 bp, Homo sapiens
acacactattactac

SEQ ID NO: 87446 - DNA, 15 bp, Homo sapiens
cacactattactacc

SEQ ID NO: 87447 - DNA, 15 bp, Homo sapiens
acactattactacca

SEQ ID NO: 87448 - DNA, 15 bp, Homo sapiens
cactattactaccaa

SEQ ID NO: 87449 - DNA, 15 bp, Homo sapiens
aatatacatacatat

SEQ ID NO: 87450 - DNA, 15 bp, Homo sapiens
atatacatacatata

SEQ ID NO: 87451 - DNA, 15 bp, Homo sapiens
tatacatacatatat

SEQ ID NO: 87452 - DNA, 15 bp, Homo sapiens
atatatgtatgtatg

SEQ ID NO: 87453 - DNA, 15 bp, Homo sapiens
tatatgtatgtatgt

SEQ ID NO: 87454 - DNA, 15 bp, Homo sapiens
atatgtatgtatgta

SEQ ID NO: 87455 - DNA, 15 bp, Homo sapiens
tatgtatgtatgtat

SEQ ID NO: 87456 - DNA, 15 bp, Homo sapiens
atgtatgtatgtatg

SEQ ID NO: 87457 - DNA, 15 bp, Homo sapiens
tgtatgtatgtatgt

SEQ ID NO: 87458 - DNA, 15 bp, Homo sapiens
gtatgtatgtatgta

SEQ ID NO: 87459 - DNA, 15 bp, Homo sapiens
atgtatgtatgtata

SEQ ID NO: 87460 - DNA, 15 bp, Homo sapiens
tgtatgtatgtatat

SEQ ID NO: 87461 - DNA, 15 bp, Homo sapiens
gtatgtatgtatatt

SEQ ID NO: 87462 - DNA, 15 bp, Homo sapiens
ttggtagtaatagta

SEQ ID NO: 87463 - DNA, 15 bp, Homo sapiens
tggtagtaatagtaa

SEQ ID NO: 87464 - DNA, 15 bp, Homo sapiens
ggtagtaatagtaat

SEQ ID NO: 87465 - DNA, 15 bp, Homo sapiens
gtagtaatagtaata

SEQ ID NO: 87466 - DNA, 15 bp, Homo sapiens
tagtaatagtaatac

SEQ ID NO: 87467 - DNA, 15 bp, Homo sapiens
agtaatagtaatact

SEQ ID NO: 87468 - DNA, 15 bp, Homo sapiens
gtaatagtaatactt

SEQ ID NO: 87469 - DNA, 15 bp, Homo sapiens
taatagtaatacttg

SEQ ID NO: 87470 - DNA, 15 bp, Homo sapiens
aatagtaatacttgg

SEQ ID NO: 87471 - DNA, 15 bp, Homo sapiens
atagtaatacttggg

SEQ ID NO: 87472 - DNA, 15 bp, Homo sapiens
tagtaatacttgggc

SEQ ID NO: 87473 - DNA, 15 bp, Homo sapiens
agtaatacttgggcc

SEQ ID NO: 87474 - DNA, 15 bp, Homo sapiens
gtaatacttgggccc

SEQ ID NO: 87475 - DNA, 15 bp, Homo sapiens
taatacttgggcccc

SEQ ID NO: 87476 - DNA, 15 bp, Homo sapiens
aatacttgggcccct

SEQ ID NO: 87477 - DNA, 15 bp, Homo sapiens
atacttgggcccctg

SEQ ID NO: 87478 - DNA, 15 bp, Homo sapiens
tacttgggcccctgc

SEQ ID NO: 87479 - DNA, 15 bp, Homo sapiens
acttgggcccctgca

SEQ ID NO: 87480 - DNA, 15 bp, Homo sapiens
cttgggcccctgcac

SEQ ID NO: 87481 - DNA, 15 bp, Homo sapiens
ttgggcccctgcacg

SEQ ID NO: 87482 - DNA, 15 bp, Homo sapiens
tgggcccctgcacgt

SEQ ID NO: 87483 - DNA, 15 bp, Homo sapiens
gggcccctgcacgtt

SEQ ID NO: 87484 - DNA, 15 bp, Homo sapiens
ggcccctgcacgttt

SEQ ID NO: 87485 - DNA, 15 bp, Homo sapiens
gcccctgcacgtttt

SEQ ID NO: 87486 - DNA, 15 bp, Homo sapiens
cccctgcacgtttta

SEQ ID NO: 87487 - DNA, 15 bp, Homo sapiens
ccctgcacgttttaa

SEQ ID NO: 87488 - DNA, 15 bp, Homo sapiens
cctgcacgttttaag

SEQ ID NO: 87489 - DNA, 15 bp, Homo sapiens
ctgcacgttttaagt

SEQ ID NO: 87490 - DNA, 15 bp, Homo sapiens
tgcacgttttaagtg

SEQ ID NO: 87491 - DNA, 15 bp, Homo sapiens
gcacgttttaagtga

SEQ ID NO: 87492 - DNA, 15 bp, Homo sapiens
cacgttttaagtgaa

SEQ ID NO: 87493 - DNA, 15 bp, Homo sapiens
acgttttaagtgaaa

SEQ ID NO: 87494 - DNA, 15 bp, Homo sapiens
cgttttaagtgaaaa

SEQ ID NO: 87495 - DNA, 15 bp, Homo sapiens
gttttaagtgaaaat

SEQ ID NO: 87496 - DNA, 15 bp, Homo sapiens
ttttaagtgaaaata

SEQ ID NO: 87497 - DNA, 15 bp, Homo sapiens
tttaagtgaaaatag

SEQ ID NO: 87498 - DNA, 15 bp, Homo sapiens
ttaagtgaaaataga

SEQ ID NO: 87499 - DNA, 15 bp, Homo sapiens
taagtgaaaatagat

SEQ ID NO: 87500 - DNA, 15 bp, Homo sapiens
aagtgaaaatagatc

SEQ ID NO: 87501 - DNA, 15 bp, Homo sapiens
agtgaaaatagatct

SEQ ID NO: 87502 - DNA, 15 bp, Homo sapiens
gtgaaaatagatcta

SEQ ID NO: 87503 - DNA, 15 bp, Homo sapiens
tgaaaatagatctaa

SEQ ID NO: 87504 - DNA, 15 bp, Homo sapiens
gaaaatagatctaat

SEQ ID NO: 87505 - DNA, 15 bp, Homo sapiens
aaaatagatctaata

SEQ ID NO: 87506 - DNA, 15 bp, Homo sapiens
aaatagatctaatat

SEQ ID NO: 87507 - DNA, 15 bp, Homo sapiens
aatagatctaatatt

SEQ ID NO: 87508 - DNA, 15 bp, Homo sapiens
atagatctaatatta

SEQ ID NO: 87509 - DNA, 15 bp, Homo sapiens
tagatctaatattaa

SEQ ID NO: 87510 - DNA, 15 bp, Homo sapiens
agatctaatattaaa

SEQ ID NO: 87511 - DNA, 15 bp, Homo sapiens
gatctaatattaaat

SEQ ID NO: 87512 - DNA, 15 bp, Homo sapiens
atctaatattaaatg

SEQ ID NO: 87513 - DNA, 15 bp, Homo sapiens
tctaatattaaatgt

SEQ ID NO: 87514 - DNA, 15 bp, Homo sapiens
ctaatattaaatgtc

SEQ ID NO: 87515 - DNA, 15 bp, Homo sapiens
taatattaaatgtct

SEQ ID NO: 87516 - DNA, 15 bp, Homo sapiens
aatattaaatgtctt

SEQ ID NO: 87517 - DNA, 15 bp, Homo sapiens
atattaaatgtcttt

SEQ ID NO: 87518 - DNA, 15 bp, Homo sapiens
tattaaatgtcttta

SEQ ID NO: 87519 - DNA, 15 bp, Homo sapiens
attaaatgtctttag

SEQ ID NO: 87520 - DNA, 15 bp, Homo sapiens
ttaaatgtctttagc

SEQ ID NO: 87521 - DNA, 15 bp, Homo sapiens
taaatgtctttagcc

SEQ ID NO: 87522 - DNA, 15 bp, Homo sapiens
aaatgtctttagccc

SEQ ID NO: 87523 - DNA, 15 bp, Homo sapiens
aatgtctttagccct

SEQ ID NO: 87524 - DNA, 15 bp, Homo sapiens
atgtctttagccctt

SEQ ID NO: 87525 - DNA, 15 bp, Homo sapiens
tgtctttagccctta

SEQ ID NO: 87526 - DNA, 15 bp, Homo sapiens
gtctttagcccttaa

SEQ ID NO: 87527 - DNA, 15 bp, Homo sapiens
tctttagcccttaaa

SEQ ID NO: 87528 - DNA, 15 bp, Homo sapiens
ctttagcccttaaat

SEQ ID NO: 87529 - DNA, 15 bp, Homo sapiens
tttagcccttaaatt

SEQ ID NO: 87530 - DNA, 15 bp, Homo sapiens
ttagcccttaaattt

SEQ ID NO: 87531 - DNA, 15 bp, Homo sapiens
tagcccttaaatttt

SEQ ID NO: 87532 - DNA, 15 bp, Homo sapiens
agcccttaaattttt

SEQ ID NO: 87533 - DNA, 15 bp, Homo sapiens
gcccttaaatttttt

SEQ ID NO: 87534 - DNA, 15 bp, Homo sapiens
cccttaaattttttt

SEQ ID NO: 87535 - DNA, 15 bp, Homo sapiens
ccttaaatttttttt

SEQ ID NO: 87536 - DNA, 15 bp, Homo sapiens
cttaaatttttttta

SEQ ID NO: 87537 - DNA, 15 bp, Homo sapiens
ttaaattttttttaa

SEQ ID NO: 87538 - DNA, 15 bp, Homo sapiens
taaattttttttaag

SEQ ID NO: 87539 - DNA, 15 bp, Homo sapiens
aaattttttttaagt

SEQ ID NO: 87540 - DNA, 15 bp, Homo sapiens
aattttttttaagtg

SEQ ID NO: 87541 - DNA, 15 bp, Homo sapiens
attttttttaagtgt

SEQ ID NO: 87542 - DNA, 15 bp, Homo sapiens
ttttttttaagtgtt

SEQ ID NO: 87543 - DNA, 15 bp, Homo sapiens
tttttttaagtgttc

SEQ ID NO: 87544 - DNA, 15 bp, Homo sapiens
ttttttaagtgttca

SEQ ID NO: 87545 - DNA, 15 bp, Homo sapiens
tttttaagtgttcag

SEQ ID NO: 87546 - DNA, 15 bp, Homo sapiens
ttttaagtgttcaga

SEQ ID NO: 87547 - DNA, 15 bp, Homo sapiens
tttaagtgttcagaa

SEQ ID NO: 87548 - DNA, 15 bp, Homo sapiens
ttaagtgttcagaag

SEQ ID NO: 87549 - DNA, 15 bp, Homo sapiens
taagtgttcagaagt

SEQ ID NO: 87550 - DNA, 15 bp, Homo sapiens
aagtgttcagaagtt

SEQ ID NO: 87551 - DNA, 15 bp, Homo sapiens
agtgttcagaagttt

SEQ ID NO: 87552 - DNA, 15 bp, Homo sapiens
gtgttcagaagtttc

SEQ ID NO: 87553 - DNA, 15 bp, Homo sapiens
tgttcagaagtttcc

SEQ ID NO: 87554 - DNA, 15 bp, Homo sapiens
gttcagaagtttccc

SEQ ID NO: 87555 - DNA, 15 bp, Homo sapiens
ttcagaagtttccct

SEQ ID NO: 87556 - DNA, 15 bp, Homo sapiens
tcagaagtttccctt

SEQ ID NO: 87557 - DNA, 15 bp, Homo sapiens
cagaagtttcccttt

SEQ ID NO: 87558 - DNA, 15 bp, Homo sapiens
agaagtttcccttta

SEQ ID NO: 87559 - DNA, 15 bp, Homo sapiens
gaagtttccctttaa

SEQ ID NO: 87560 - DNA, 15 bp, Homo sapiens
aagtttccctttaaa

SEQ ID NO: 87561 - DNA, 15 bp, Homo sapiens
agtttccctttaaaa

SEQ ID NO: 87562 - DNA, 15 bp, Homo sapiens
gtttccctttaaaaa

SEQ ID NO: 87563 - DNA, 15 bp, Homo sapiens
tttccctttaaaaaa

SEQ ID NO: 87564 - DNA, 15 bp, Homo sapiens
ttccctttaaaaaaa

SEQ ID NO: 87565 - DNA, 15 bp, Homo sapiens
tccctttaaaaaaat

SEQ ID NO: 87566 - DNA, 15 bp, Homo sapiens
ccctttaaaaaaatt

SEQ ID NO: 87567 - DNA, 15 bp, Homo sapiens
cctttaaaaaaattt

SEQ ID NO: 87568 - DNA, 15 bp, Homo sapiens
ctttaaaaaaatttt

SEQ ID NO: 87569 - DNA, 15 bp, Homo sapiens
tttaaaaaaattttt

SEQ ID NO: 87570 - DNA, 15 bp, Homo sapiens
ttaaaaaaattttta

SEQ ID NO: 87571 - DNA, 15 bp, Homo sapiens
taaaaaaatttttaa

SEQ ID NO: 87572 - DNA, 15 bp, Homo sapiens
aaaaaaatttttaat

SEQ ID NO: 87573 - DNA, 15 bp, Homo sapiens
aaaaaatttttaata

SEQ ID NO: 87574 - DNA, 15 bp, Homo sapiens
aaaaatttttaatat

SEQ ID NO: 87575 - DNA, 15 bp, Homo sapiens
aaaatttttaatata

SEQ ID NO: 87576 - DNA, 15 bp, Homo sapiens
aaatttttaatatat

SEQ ID NO: 87577 - DNA, 15 bp, Homo sapiens
aatttttaatatata

SEQ ID NO: 87578 - DNA, 15 bp, Homo sapiens
atttttaatatataa

SEQ ID NO: 87579 - DNA, 15 bp, Homo sapiens
tttttaatatataat

SEQ ID NO: 87580 - DNA, 15 bp, Homo sapiens
ttttaatatataata

SEQ ID NO: 87581 - DNA, 15 bp, Homo sapiens
tttaatatataataa

SEQ ID NO: 87582 - DNA, 15 bp, Homo sapiens
ttaatatataataat

SEQ ID NO: 87583 - DNA, 15 bp, Homo sapiens
taatatataataatt

SEQ ID NO: 87584 - DNA, 15 bp, Homo sapiens
aatatataataattg

SEQ ID NO: 87585 - DNA, 15 bp, Homo sapiens
atatataataattgt

SEQ ID NO: 87586 - DNA, 15 bp, Homo sapiens
tatataataattgta

SEQ ID NO: 87587 - DNA, 15 bp, Homo sapiens
atataataattgtac

SEQ ID NO: 87588 - DNA, 15 bp, Homo sapiens
tataataattgtaca

SEQ ID NO: 87589 - DNA, 15 bp, Homo sapiens
ataataattgtacat

SEQ ID NO: 87590 - DNA, 15 bp, Homo sapiens
taataattgtacata

SEQ ID NO: 87591 - DNA, 15 bp, Homo sapiens
aataattgtacatat

SEQ ID NO: 87592 - DNA, 15 bp, Homo sapiens
ataattgtacatatt

SEQ ID NO: 87593 - DNA, 15 bp, Homo sapiens
taattgtacatattt

SEQ ID NO: 87594 - DNA, 15 bp, Homo sapiens
aattgtacatattta

SEQ ID NO: 87595 - DNA, 15 bp, Homo sapiens
attgtacatatttat

SEQ ID NO: 87596 - DNA, 15 bp, Homo sapiens
ttgtacatatttatg

SEQ ID NO: 87597 - DNA, 15 bp, Homo sapiens
tgtacatatttatgg

SEQ ID NO: 87598 - DNA, 15 bp, Homo sapiens
gtacatatttatggg

SEQ ID NO: 87599 - DNA, 15 bp, Homo sapiens
tacatatttatggga

SEQ ID NO: 87600 - DNA, 15 bp, Homo sapiens
acatatttatgggat

SEQ ID NO: 87601 - DNA, 15 bp, Homo sapiens
catatttatgggata

SEQ ID NO: 87602 - DNA, 15 bp, Homo sapiens
atatttatgggatac

SEQ ID NO: 87603 - DNA, 15 bp, Homo sapiens
tatttatgggataca

SEQ ID NO: 87604 - DNA, 15 bp, Homo sapiens
atttatgggatacag

SEQ ID NO: 87605 - DNA, 15 bp, Homo sapiens
tttatgggatacaga

SEQ ID NO: 87606 - DNA, 15 bp, Homo sapiens
ttatgggatacagag

SEQ ID NO: 87607 - DNA, 15 bp, Homo sapiens
tatgggatacagagt

SEQ ID NO: 87608 - DNA, 15 bp, Homo sapiens
atgggatacagagtg

SEQ ID NO: 87609 - DNA, 15 bp, Homo sapiens
tgggatacagagtga

SEQ ID NO: 87610 - DNA, 15 bp, Homo sapiens
gggatacagagtgat

SEQ ID NO: 87611 - DNA, 15 bp, Homo sapiens
ggatacagagtgata

SEQ ID NO: 87612 - DNA, 15 bp, Homo sapiens
gatacagagtgatat

SEQ ID NO: 87613 - DNA, 15 bp, Homo sapiens
atacagagtgatatt

SEQ ID NO: 87614 - DNA, 15 bp, Homo sapiens
tacagagtgatattt

SEQ ID NO: 87615 - DNA, 15 bp, Homo sapiens
acagagtgatatttt

SEQ ID NO: 87616 - DNA, 15 bp, Homo sapiens
cagagtgatattttc

SEQ ID NO: 87617 - DNA, 15 bp, Homo sapiens
agagtgatattttca

SEQ ID NO: 87618 - DNA, 15 bp, Homo sapiens
gagtgatattttcat

SEQ ID NO: 87619 - DNA, 15 bp, Homo sapiens
agtgatattttcatg

SEQ ID NO: 87620 - DNA, 15 bp, Homo sapiens
gtgatattttcatgt

SEQ ID NO: 87621 - DNA, 15 bp, Homo sapiens
tgatattttcatgta

SEQ ID NO: 87622 - DNA, 15 bp, Homo sapiens
atattttcatgtatg

SEQ ID NO: 87623 - DNA, 15 bp, Homo sapiens
tattttcatgtatgc

SEQ ID NO: 87624 - DNA, 15 bp, Homo sapiens
attttcatgtatgca

SEQ ID NO: 87625 - DNA, 15 bp, Homo sapiens
ttttcatgtatgcag

SEQ ID NO: 87626 - DNA, 15 bp, Homo sapiens
tttcatgtatgcagt

SEQ ID NO: 87627 - DNA, 15 bp, Homo sapiens
ttcatgtatgcagtg

SEQ ID NO: 87628 - DNA, 15 bp, Homo sapiens
tcatgtatgcagtgt

SEQ ID NO: 87629 - DNA, 15 bp, Homo sapiens
catgtatgcagtgtg

SEQ ID NO: 87630 - DNA, 15 bp, Homo sapiens
atgtatgcagtgtgt

SEQ ID NO: 87631 - DNA, 15 bp, Homo sapiens
tgtatgcagtgtgtg

SEQ ID NO: 87632 - DNA, 15 bp, Homo sapiens
gtatgcagtgtgtga

SEQ ID NO: 87633 - DNA, 15 bp, Homo sapiens
tatgcagtgtgtgat

SEQ ID NO: 87634 - DNA, 15 bp, Homo sapiens
atgcagtgtgtgatg

SEQ ID NO: 87635 - DNA, 15 bp, Homo sapiens
tgcagtgtgtgatga

SEQ ID NO: 87636 - DNA, 15 bp, Homo sapiens
gcagtgtgtgatgat

SEQ ID NO: 87637 - DNA, 15 bp, Homo sapiens
cagtgtgtgatgatc

SEQ ID NO: 87638 - DNA, 15 bp, Homo sapiens
agtgtgtgatgatca

SEQ ID NO: 87639 - DNA, 15 bp, Homo sapiens
gtgtgtgatgatcaa

SEQ ID NO: 87640 - DNA, 15 bp, Homo sapiens
tgtgtgatgatcaaa

SEQ ID NO: 87641 - DNA, 15 bp, Homo sapiens
gtgtgatgatcaaat

SEQ ID NO: 87642 - DNA, 15 bp, Homo sapiens
tgtgatgatcaaatc

SEQ ID NO: 87643 - DNA, 15 bp, Homo sapiens
gtgatgatcaaatca

SEQ ID NO: 87644 - DNA, 15 bp, Homo sapiens
tgatgatcaaatcag

SEQ ID NO: 87645 - DNA, 15 bp, Homo sapiens
gatgatcaaatcagg

SEQ ID NO: 87646 - DNA, 15 bp, Homo sapiens
atgatcaaatcagga

SEQ ID NO: 87647 - DNA, 15 bp, Homo sapiens
tgatcaaatcaggat

SEQ ID NO: 87648 - DNA, 15 bp, Homo sapiens
gatcaaatcaggata

SEQ ID NO: 87649 - DNA, 15 bp, Homo sapiens
atcaaatcaggataa

SEQ ID NO: 87650 - DNA, 15 bp, Homo sapiens
tcaaatcaggataat

SEQ ID NO: 87651 - DNA, 15 bp, Homo sapiens
caaatcaggataatt

SEQ ID NO: 87652 - DNA, 15 bp, Homo sapiens
aaatcaggataatta

SEQ ID NO: 87653 - DNA, 15 bp, Homo sapiens
aatcaggataattag

SEQ ID NO: 87654 - DNA, 15 bp, Homo sapiens
atcaggataattagc

SEQ ID NO: 87655 - DNA, 15 bp, Homo sapiens
tcaggataattagca

SEQ ID NO: 87656 - DNA, 15 bp, Homo sapiens
caggataattagcat

SEQ ID NO: 87657 - DNA, 15 bp, Homo sapiens
aggataattagcata

SEQ ID NO: 87658 - DNA, 15 bp, Homo sapiens
ggataattagcatat

SEQ ID NO: 87659 - DNA, 15 bp, Homo sapiens
gataattagcatatg

SEQ ID NO: 87660 - DNA, 15 bp, Homo sapiens
ataattagcatatgg

SEQ ID NO: 87661 - DNA, 15 bp, Homo sapiens
taattagcatatgga

SEQ ID NO: 87662 - DNA, 15 bp, Homo sapiens
aattagcatatggat

SEQ ID NO: 87663 - DNA, 15 bp, Homo sapiens
attagcatatggatc

SEQ ID NO: 87664 - DNA, 15 bp, Homo sapiens
ttagcatatggatca

SEQ ID NO: 87665 - DNA, 15 bp, Homo sapiens
tagcatatggatcac

SEQ ID NO: 87666 - DNA, 15 bp, Homo sapiens
agcatatggatcacc

SEQ ID NO: 87667 - DNA, 15 bp, Homo sapiens
gcatatggatcacct

SEQ ID NO: 87668 - DNA, 15 bp, Homo sapiens
catatggatcacctc

SEQ ID NO: 87669 - DNA, 15 bp, Homo sapiens
atatggatcacctca

SEQ ID NO: 87670 - DNA, 15 bp, Homo sapiens
tatggatcacctcaa

SEQ ID NO: 87671 - DNA, 15 bp, Homo sapiens
atggatcacctcaaa

SEQ ID NO: 87672 - DNA, 15 bp, Homo sapiens
tggatcacctcaaac

SEQ ID NO: 87673 - DNA, 15 bp, Homo sapiens
ggatcacctcaaaca

SEQ ID NO: 87674 - DNA, 15 bp, Homo sapiens
gatcacctcaaacat

SEQ ID NO: 87675 - DNA, 15 bp, Homo sapiens
atcacctcaaacatt

SEQ ID NO: 87676 - DNA, 15 bp, Homo sapiens
tcacctcaaacattt

SEQ ID NO: 87677 - DNA, 15 bp, Homo sapiens
cacctcaaacatttg

SEQ ID NO: 87678 - DNA, 15 bp, Homo sapiens
acctcaaacatttgt

SEQ ID NO: 87679 - DNA, 15 bp, Homo sapiens
cctcaaacatttgtc

SEQ ID NO: 87680 - DNA, 15 bp, Homo sapiens
ctcaaacatttgtca

SEQ ID NO: 87681 - DNA, 15 bp, Homo sapiens
tcaaacatttgtcat

SEQ ID NO: 87682 - DNA, 15 bp, Homo sapiens
caaacatttgtcatt

SEQ ID NO: 87683 - DNA, 15 bp, Homo sapiens
aaacatttgtcattt

SEQ ID NO: 87684 - DNA, 15 bp, Homo sapiens
aacatttgtcatttc

SEQ ID NO: 87685 - DNA, 15 bp, Homo sapiens
acatttgtcatttct

SEQ ID NO: 87686 - DNA, 15 bp, Homo sapiens
catttgtcatttctt

SEQ ID NO: 87687 - DNA, 15 bp, Homo sapiens
atttgtcatttcttt

SEQ ID NO: 87688 - DNA, 15 bp, Homo sapiens
tttgtcatttctttg

SEQ ID NO: 87689 - DNA, 15 bp, Homo sapiens
ttgtcatttctttgt

SEQ ID NO: 87690 - DNA, 15 bp, Homo sapiens
tgtcatttctttgtg

SEQ ID NO: 87691 - DNA, 15 bp, Homo sapiens
gtcatttctttgtgt

SEQ ID NO: 87692 - DNA, 15 bp, Homo sapiens
tcatttctttgtgtt

SEQ ID NO: 87693 - DNA, 15 bp, Homo sapiens
catttctttgtgtta

SEQ ID NO: 87694 - DNA, 15 bp, Homo sapiens
atttctttgtgttag

SEQ ID NO: 87695 - DNA, 15 bp, Homo sapiens
tttctttgtgttagg

SEQ ID NO: 87696 - DNA, 15 bp, Homo sapiens
ttctttgtgttagga

SEQ ID NO: 87697 - DNA, 15 bp, Homo sapiens
tctttgtgttaggaa

SEQ ID NO: 87698 - DNA, 15 bp, Homo sapiens
ctttgtgttaggaac

SEQ ID NO: 87699 - DNA, 15 bp, Homo sapiens
tttgtgttaggaaca

SEQ ID NO: 87700 - DNA, 15 bp, Homo sapiens
ttgtgttaggaacat

SEQ ID NO: 87701 - DNA, 15 bp, Homo sapiens
tgtgttaggaacatt

SEQ ID NO: 87702 - DNA, 15 bp, Homo sapiens
gtgttaggaacattc

SEQ ID NO: 87703 - DNA, 15 bp, Homo sapiens
tgttaggaacattca

SEQ ID NO: 87704 - DNA, 15 bp, Homo sapiens
gttaggaacattcaa

SEQ ID NO: 87705 - DNA, 15 bp, Homo sapiens
ttaggaacattcaaa

SEQ ID NO: 87706 - DNA, 15 bp, Homo sapiens
taggaacattcaaaa

SEQ ID NO: 87707 - DNA, 15 bp, Homo sapiens
aggaacattcaaaat

SEQ ID NO: 87708 - DNA, 15 bp, Homo sapiens
ggaacattcaaaatt

SEQ ID NO: 87709 - DNA, 15 bp, Homo sapiens
gaacattcaaaattc

SEQ ID NO: 87710 - DNA, 15 bp, Homo sapiens
aacattcaaaattct

SEQ ID NO: 87711 - DNA, 15 bp, Homo sapiens
acattcaaaattctg

SEQ ID NO: 87712 - DNA, 15 bp, Homo sapiens
cattcaaaattctgt

SEQ ID NO: 87713 - DNA, 15 bp, Homo sapiens
attcaaaattctgtc

SEQ ID NO: 87714 - DNA, 15 bp, Homo sapiens
ttcaaaattctgtct

SEQ ID NO: 87715 - DNA, 15 bp, Homo sapiens
tcaaaattctgtctt

SEQ ID NO: 87716 - DNA, 15 bp, Homo sapiens
caaaattctgtcttc

SEQ ID NO: 87717 - DNA, 15 bp, Homo sapiens
aaaattctgtcttct

SEQ ID NO: 87718 - DNA, 15 bp, Homo sapiens
aaattctgtcttcta

SEQ ID NO: 87719 - DNA, 15 bp, Homo sapiens
aattctgtcttctag

SEQ ID NO: 87720 - DNA, 15 bp, Homo sapiens
attctgtcttctagc

SEQ ID NO: 87721 - DNA, 15 bp, Homo sapiens
ttctgtcttctagct

SEQ ID NO: 87722 - DNA, 15 bp, Homo sapiens
tctgtcttctagcta

SEQ ID NO: 87723 - DNA, 15 bp, Homo sapiens
ctgtcttctagctat

SEQ ID NO: 87724 - DNA, 15 bp, Homo sapiens
tgtcttctagctatt

SEQ ID NO: 87725 - DNA, 15 bp, Homo sapiens
gtcttctagctattt

SEQ ID NO: 87726 - DNA, 15 bp, Homo sapiens
tcttctagctatttg

SEQ ID NO: 87727 - DNA, 15 bp, Homo sapiens
cttctagctatttga

SEQ ID NO: 87728 - DNA, 15 bp, Homo sapiens
ttctagctatttgaa

SEQ ID NO: 87729 - DNA, 15 bp, Homo sapiens
tctagctatttgaaa

SEQ ID NO: 87730 - DNA, 15 bp, Homo sapiens
ctagctatttgaaaa

SEQ ID NO: 87731 - DNA, 15 bp, Homo sapiens
tagctatttgaaaat

SEQ ID NO: 87732 - DNA, 15 bp, Homo sapiens
agctatttgaaaata

SEQ ID NO: 87733 - DNA, 15 bp, Homo sapiens
gctatttgaaaatat

SEQ ID NO: 87734 - DNA, 15 bp, Homo sapiens
ctatttgaaaatata

SEQ ID NO: 87735 - DNA, 15 bp, Homo sapiens
tatttgaaaatatac

SEQ ID NO: 87736 - DNA, 15 bp, Homo sapiens
atttgaaaatataca

SEQ ID NO: 87737 - DNA, 15 bp, Homo sapiens
tttgaaaatatacag

SEQ ID NO: 87738 - DNA, 15 bp, Homo sapiens
ttgaaaatatacagt

SEQ ID NO: 87739 - DNA, 15 bp, Homo sapiens
tgaaaatatacagta

SEQ ID NO: 87740 - DNA, 15 bp, Homo sapiens
gaaaatatacagtaa

SEQ ID NO: 87741 - DNA, 15 bp, Homo sapiens
aaaatatacagtaaa

SEQ ID NO: 87742 - DNA, 15 bp, Homo sapiens
aaatatacagtaaat

SEQ ID NO: 87743 - DNA, 15 bp, Homo sapiens
aatatacagtaaatt

SEQ ID NO: 87744 - DNA, 15 bp, Homo sapiens
atatacagtaaatta

SEQ ID NO: 87745 - DNA, 15 bp, Homo sapiens
tatacagtaaattat

SEQ ID NO: 87746 - DNA, 15 bp, Homo sapiens
atacagtaaattatt

SEQ ID NO: 87747 - DNA, 15 bp, Homo sapiens
tacagtaaattattg

SEQ ID NO: 87748 - DNA, 15 bp, Homo sapiens
acagtaaattattgt

SEQ ID NO: 87749 - DNA, 15 bp, Homo sapiens
cagtaaattattgtt

SEQ ID NO: 87750 - DNA, 15 bp, Homo sapiens
agtaaattattgttg

SEQ ID NO: 87751 - DNA, 15 bp, Homo sapiens
gtaaattattgttga

SEQ ID NO: 87752 - DNA, 15 bp, Homo sapiens
taaattattgttgac

SEQ ID NO: 87753 - DNA, 15 bp, Homo sapiens
aaattattgttgact

SEQ ID NO: 87754 - DNA, 15 bp, Homo sapiens
aattattgttgacta

SEQ ID NO: 87755 - DNA, 15 bp, Homo sapiens
attattgttgactag

SEQ ID NO: 87756 - DNA, 15 bp, Homo sapiens
ttattgttgactagt

SEQ ID NO: 87757 - DNA, 15 bp, Homo sapiens
tattgttgactagtt

SEQ ID NO: 87758 - DNA, 15 bp, Homo sapiens
attgttgactagtta

SEQ ID NO: 87759 - DNA, 15 bp, Homo sapiens
ttgttgactagttac

SEQ ID NO: 87760 - DNA, 15 bp, Homo sapiens
tgttgactagttaca

SEQ ID NO: 87761 - DNA, 15 bp, Homo sapiens
gttgactagttacag

SEQ ID NO: 87762 - DNA, 15 bp, Homo sapiens
ttgactagttacagt

SEQ ID NO: 87763 - DNA, 15 bp, Homo sapiens
tgactagttacagtt

SEQ ID NO: 87764 - DNA, 15 bp, Homo sapiens
gactagttacagttc

SEQ ID NO: 87765 - DNA, 15 bp, Homo sapiens
actagttacagttct

SEQ ID NO: 87766 - DNA, 15 bp, Homo sapiens
ctagttacagttcta

SEQ ID NO: 87767 - DNA, 15 bp, Homo sapiens
tagttacagttctat

SEQ ID NO: 87768 - DNA, 15 bp, Homo sapiens
agttacagttctata

SEQ ID NO: 87769 - DNA, 15 bp, Homo sapiens
gttacagttctatag

SEQ ID NO: 87770 - DNA, 15 bp, Homo sapiens
ttacagttctataga

SEQ ID NO: 87771 - DNA, 15 bp, Homo sapiens
tacagttctatagaa

SEQ ID NO: 87772 - DNA, 15 bp, Homo sapiens
acagttctatagaac

SEQ ID NO: 87773 - DNA, 15 bp, Homo sapiens
cagttctatagaaca

SEQ ID NO: 87774 - DNA, 15 bp, Homo sapiens
agttctatagaacac

SEQ ID NO: 87775 - DNA, 15 bp, Homo sapiens
gttctatagaacact

SEQ ID NO: 87776 - DNA, 15 bp, Homo sapiens
ttctatagaacacta

SEQ ID NO: 87777 - DNA, 15 bp, Homo sapiens
tctatagaacactat

SEQ ID NO: 87778 - DNA, 15 bp, Homo sapiens
ctatagaacactata

SEQ ID NO: 87779 - DNA, 15 bp, Homo sapiens
tatagaacactataa

SEQ ID NO: 87780 - DNA, 15 bp, Homo sapiens
atagaacactataat

SEQ ID NO: 87781 - DNA, 15 bp, Homo sapiens
tagaacactataatt

SEQ ID NO: 87782 - DNA, 15 bp, Homo sapiens
agaacactataattt

SEQ ID NO: 87783 - DNA, 15 bp, Homo sapiens
gaacactataattta

SEQ ID NO: 87784 - DNA, 15 bp, Homo sapiens
aacactataatttat

SEQ ID NO: 87785 - DNA, 15 bp, Homo sapiens
acactataatttatt

SEQ ID NO: 87786 - DNA, 15 bp, Homo sapiens
cactataatttattc

SEQ ID NO: 87787 - DNA, 15 bp, Homo sapiens
actataatttattcc

SEQ ID NO: 87788 - DNA, 15 bp, Homo sapiens
ctataatttattcct

SEQ ID NO: 87789 - DNA, 15 bp, Homo sapiens
tataatttattcctc

SEQ ID NO: 87790 - DNA, 15 bp, Homo sapiens
ataatttattcctcc

SEQ ID NO: 87791 - DNA, 15 bp, Homo sapiens
taatttattcctcct

SEQ ID NO: 87792 - DNA, 15 bp, Homo sapiens
aatttattcctcctg

SEQ ID NO: 87793 - DNA, 15 bp, Homo sapiens
atttattcctcctgt

SEQ ID NO: 87794 - DNA, 15 bp, Homo sapiens
tttattcctcctgtg

SEQ ID NO: 87795 - DNA, 15 bp, Homo sapiens
ttattcctcctgtgt

SEQ ID NO: 87796 - DNA, 15 bp, Homo sapiens
tattcctcctgtgtg

SEQ ID NO: 87797 - DNA, 15 bp, Homo sapiens
attcctcctgtgtgt

SEQ ID NO: 87798 - DNA, 15 bp, Homo sapiens
ttcctcctgtgtgta

SEQ ID NO: 87799 - DNA, 15 bp, Homo sapiens
tcctcctgtgtgtaa

SEQ ID NO: 87800 - DNA, 15 bp, Homo sapiens
cctcctgtgtgtaat

SEQ ID NO: 87801 - DNA, 15 bp, Homo sapiens
ctcctgtgtgtaatt

SEQ ID NO: 87802 - DNA, 15 bp, Homo sapiens
tcctgtgtgtaattt

SEQ ID NO: 87803 - DNA, 15 bp, Homo sapiens
cctgtgtgtaatttt

SEQ ID NO: 87804 - DNA, 15 bp, Homo sapiens
ctgtgtgtaattttt

SEQ ID NO: 87805 - DNA, 15 bp, Homo sapiens
tgtgtgtaatttttt

SEQ ID NO: 87806 - DNA, 15 bp, Homo sapiens
gtgtgtaatttttta

SEQ ID NO: 87807 - DNA, 15 bp, Homo sapiens
tgtgtaattttttat

SEQ ID NO: 87808 - DNA, 15 bp, Homo sapiens
gtgtaattttttatc

SEQ ID NO: 87809 - DNA, 15 bp, Homo sapiens
tgtaattttttatct

SEQ ID NO: 87810 - DNA, 15 bp, Homo sapiens
gtaattttttatctt

SEQ ID NO: 87811 - DNA, 15 bp, Homo sapiens
taattttttatcttt

SEQ ID NO: 87812 - DNA, 15 bp, Homo sapiens
aattttttatctttt

SEQ ID NO: 87813 - DNA, 15 bp, Homo sapiens
attttttatctttta

SEQ ID NO: 87814 - DNA, 15 bp, Homo sapiens
ttttttatcttttaa

SEQ ID NO: 87815 - DNA, 15 bp, Homo sapiens
tttttatcttttaac

SEQ ID NO: 87816 - DNA, 15 bp, Homo sapiens
ttttatcttttaacc

SEQ ID NO: 87817 - DNA, 15 bp, Homo sapiens
tttatcttttaacca

SEQ ID NO: 87818 - DNA, 15 bp, Homo sapiens
ttatcttttaaccaa

SEQ ID NO: 87819 - DNA, 15 bp, Homo sapiens
tatcttttaaccaac

SEQ ID NO: 87820 - DNA, 15 bp, Homo sapiens
atcttttaaccaaca

SEQ ID NO: 87821 - DNA, 15 bp, Homo sapiens
tcttttaaccaacat

SEQ ID NO: 87822 - DNA, 15 bp, Homo sapiens
cttttaaccaacatc

SEQ ID NO: 87823 - DNA, 15 bp, Homo sapiens
ttttaaccaacatct

SEQ ID NO: 87824 - DNA, 15 bp, Homo sapiens
tttaaccaacatctc

SEQ ID NO: 87825 - DNA, 15 bp, Homo sapiens
ttaaccaacatctcc

SEQ ID NO: 87826 - DNA, 15 bp, Homo sapiens
taaccaacatctccc

SEQ ID NO: 87827 - DNA, 15 bp, Homo sapiens
aaccaacatctccct

SEQ ID NO: 87828 - DNA, 15 bp, Homo sapiens
accaacatctcccta

SEQ ID NO: 87829 - DNA, 15 bp, Homo sapiens
ccaacatctccctat

SEQ ID NO: 87830 - DNA, 15 bp, Homo sapiens
caacatctccctatc

SEQ ID NO: 87831 - DNA, 15 bp, Homo sapiens
aacatctccctatcc

SEQ ID NO: 87832 - DNA, 15 bp, Homo sapiens
acatctccctatcct

SEQ ID NO: 87833 - DNA, 15 bp, Homo sapiens
catctccctatcctc

SEQ ID NO: 87834 - DNA, 15 bp, Homo sapiens
atctccctatcctcc

SEQ ID NO: 87835 - DNA, 15 bp, Homo sapiens
tctccctatcctccc

SEQ ID NO: 87836 - DNA, 15 bp, Homo sapiens
ctccctatcctcccc

SEQ ID NO: 87837 - DNA, 15 bp, Homo sapiens
tccctatcctcccct

SEQ ID NO: 87838 - DNA, 15 bp, Homo sapiens
ccctatcctcccctc

SEQ ID NO: 87839 - DNA, 15 bp, Homo sapiens
cctatcctcccctcc

SEQ ID NO: 87840 - DNA, 15 bp, Homo sapiens
ctatcctcccctccc

SEQ ID NO: 87841 - DNA, 15 bp, Homo sapiens
tatcctcccctccca

SEQ ID NO: 87842 - DNA, 15 bp, Homo sapiens
atcctcccctcccac

SEQ ID NO: 87843 - DNA, 15 bp, Homo sapiens
tcctcccctcccact

SEQ ID NO: 87844 - DNA, 15 bp, Homo sapiens
cctcccctcccactc

SEQ ID NO: 87845 - DNA, 15 bp, Homo sapiens
ctcccctcccactcc

SEQ ID NO: 87846 - DNA, 15 bp, Homo sapiens
tcccctcccactccc

SEQ ID NO: 87847 - DNA, 15 bp, Homo sapiens
cccctcccactccct

SEQ ID NO: 87848 - DNA, 15 bp, Homo sapiens
ccctcccactccctt

SEQ ID NO: 87849 - DNA, 15 bp, Homo sapiens
cctcccactcccttt

SEQ ID NO: 87850 - DNA, 15 bp, Homo sapiens
ctcccactccctttc

SEQ ID NO: 87851 - DNA, 15 bp, Homo sapiens
tcccactccctttcc

SEQ ID NO: 87852 - DNA, 15 bp, Homo sapiens
cccactccctttccc

SEQ ID NO: 87853 - DNA, 15 bp, Homo sapiens
ccactccctttcccg

SEQ ID NO: 87854 - DNA, 15 bp, Homo sapiens
cactccctttcccgg

SEQ ID NO: 87855 - DNA, 15 bp, Homo sapiens
actccctttcccggc

SEQ ID NO: 87856 - DNA, 15 bp, Homo sapiens
ctccctttcccggcc

SEQ ID NO: 87857 - DNA, 15 bp, Homo sapiens
tccctttcccggcct

SEQ ID NO: 87858 - DNA, 15 bp, Homo sapiens
ccctttcccggcctc

SEQ ID NO: 87859 - DNA, 15 bp, Homo sapiens
cctttcccggcctct

SEQ ID NO: 87860 - DNA, 15 bp, Homo sapiens
ctttcccggcctcta

SEQ ID NO: 87861 - DNA, 15 bp, Homo sapiens
tttcccggcctctaa

SEQ ID NO: 87862 - DNA, 15 bp, Homo sapiens
ttcccggcctctaat

SEQ ID NO: 87863 - DNA, 15 bp, Homo sapiens
tcccggcctctaata

SEQ ID NO: 87864 - DNA, 15 bp, Homo sapiens
cccggcctctaataa

SEQ ID NO: 87865 - DNA, 15 bp, Homo sapiens
ccggcctctaataac

SEQ ID NO: 87866 - DNA, 15 bp, Homo sapiens
cggcctctaataacc

SEQ ID NO: 87867 - DNA, 15 bp, Homo sapiens
ggcctctaataacca

SEQ ID NO: 87868 - DNA, 15 bp, Homo sapiens
gcctctaataaccac

SEQ ID NO: 87869 - DNA, 15 bp, Homo sapiens
cctctaataaccaca

SEQ ID NO: 87870 - DNA, 15 bp, Homo sapiens
ctctaataaccacac

SEQ ID NO: 87871 - DNA, 15 bp, Homo sapiens
tctaataaccacact

SEQ ID NO: 87872 - DNA, 15 bp, Homo sapiens
ctaataaccacactc

SEQ ID NO: 87873 - DNA, 15 bp, Homo sapiens
taataaccacactct

SEQ ID NO: 87874 - DNA, 15 bp, Homo sapiens
aataaccacactctt

SEQ ID NO: 87875 - DNA, 15 bp, Homo sapiens
ataaccacactctta

SEQ ID NO: 87876 - DNA, 15 bp, Homo sapiens
taaccacactcttat

SEQ ID NO: 87877 - DNA, 15 bp, Homo sapiens
aaccacactcttatg

SEQ ID NO: 87878 - DNA, 15 bp, Homo sapiens
accacactcttatga

SEQ ID NO: 87879 - DNA, 15 bp, Homo sapiens
ccacactcttatgag

SEQ ID NO: 87880 - DNA, 15 bp, Homo sapiens
cacactcttatgagc

SEQ ID NO: 87881 - DNA, 15 bp, Homo sapiens
acactcttatgagct

SEQ ID NO: 87882 - DNA, 15 bp, Homo sapiens
cactcttatgagctc

SEQ ID NO: 87883 - DNA, 15 bp, Homo sapiens
actcttatgagctca

SEQ ID NO: 87884 - DNA, 15 bp, Homo sapiens
ctcttatgagctcaa

SEQ ID NO: 87885 - DNA, 15 bp, Homo sapiens
tcttatgagctcaac

SEQ ID NO: 87886 - DNA, 15 bp, Homo sapiens
cttatgagctcaact

SEQ ID NO: 87887 - DNA, 15 bp, Homo sapiens
ttatgagctcaactt

SEQ ID NO: 87888 - DNA, 15 bp, Homo sapiens
tatgagctcaacttt

SEQ ID NO: 87889 - DNA, 15 bp, Homo sapiens
atgagctcaactttt

SEQ ID NO: 87890 - DNA, 15 bp, Homo sapiens
tgagctcaacttttt

SEQ ID NO: 87891 - DNA, 15 bp, Homo sapiens
gagctcaactttttt

SEQ ID NO: 87892 - DNA, 15 bp, Homo sapiens
agctcaactttttta

SEQ ID NO: 87893 - DNA, 15 bp, Homo sapiens
gctcaacttttttag

SEQ ID NO: 87894 - DNA, 15 bp, Homo sapiens
ctcaacttttttagc

SEQ ID NO: 87895 - DNA, 15 bp, Homo sapiens
tcaacttttttagct

SEQ ID NO: 87896 - DNA, 15 bp, Homo sapiens
caacttttttagctt

SEQ ID NO: 87897 - DNA, 15 bp, Homo sapiens
aacttttttagcttc

SEQ ID NO: 87898 - DNA, 15 bp, Homo sapiens
acttttttagcttcc

SEQ ID NO: 87899 - DNA, 15 bp, Homo sapiens
cttttttagcttcca

SEQ ID NO: 87900 - DNA, 15 bp, Homo sapiens
ttttttagcttccat

SEQ ID NO: 87901 - DNA, 15 bp, Homo sapiens
tttttagcttccata

SEQ ID NO: 87902 - DNA, 15 bp, Homo sapiens
ttttagcttccatat

SEQ ID NO: 87903 - DNA, 15 bp, Homo sapiens
tttagcttccatata

SEQ ID NO: 87904 - DNA, 15 bp, Homo sapiens
ttagcttccatatat

SEQ ID NO: 87905 - DNA, 15 bp, Homo sapiens
tagcttccatatatg

SEQ ID NO: 87906 - DNA, 15 bp, Homo sapiens
agcttccatatatga

SEQ ID NO: 87907 - DNA, 15 bp, Homo sapiens
gcttccatatatgag

SEQ ID NO: 87908 - DNA, 15 bp, Homo sapiens
cttccatatatgagt

SEQ ID NO: 87909 - DNA, 15 bp, Homo sapiens
ttccatatatgagtg

SEQ ID NO: 87910 - DNA, 15 bp, Homo sapiens
tccatatatgagtga

SEQ ID NO: 87911 - DNA, 15 bp, Homo sapiens
ccatatatgagtgag

SEQ ID NO: 87912 - DNA, 15 bp, Homo sapiens
catatatgagtgaga

SEQ ID NO: 87913 - DNA, 15 bp, Homo sapiens
atatatgagtgagaa

SEQ ID NO: 87914 - DNA, 15 bp, Homo sapiens
tatatgagtgagaac

SEQ ID NO: 87915 - DNA, 15 bp, Homo sapiens
atatgagtgagaaca

SEQ ID NO: 87916 - DNA, 15 bp, Homo sapiens
atgagtgagaacata

SEQ ID NO: 87917 - DNA, 15 bp, Homo sapiens
tgagtgagaacatac

SEQ ID NO: 87918 - DNA, 15 bp, Homo sapiens
gagtgagaacatacg

SEQ ID NO: 87919 - DNA, 15 bp, Homo sapiens
agtgagaacatacgg

SEQ ID NO: 87920 - DNA, 15 bp, Homo sapiens
gtgagaacatacggt

SEQ ID NO: 87921 - DNA, 15 bp, Homo sapiens
tgagaacatacggta

SEQ ID NO: 87922 - DNA, 15 bp, Homo sapiens
gagaacatacggtat

SEQ ID NO: 87923 - DNA, 15 bp, Homo sapiens
agaacatacggtatt

SEQ ID NO: 87924 - DNA, 15 bp, Homo sapiens
gaacatacggtattt

SEQ ID NO: 87925 - DNA, 15 bp, Homo sapiens
aacatacggtattta

SEQ ID NO: 87926 - DNA, 15 bp, Homo sapiens
acatacggtatttat

SEQ ID NO: 87927 - DNA, 15 bp, Homo sapiens
catacggtatttatc

SEQ ID NO: 87928 - DNA, 15 bp, Homo sapiens
atacggtatttatct

SEQ ID NO: 87929 - DNA, 15 bp, Homo sapiens
tacggtatttatctt

SEQ ID NO: 87930 - DNA, 15 bp, Homo sapiens
acggtatttatcttt

SEQ ID NO: 87931 - DNA, 15 bp, Homo sapiens
cggtatttatctttc

SEQ ID NO: 87932 - DNA, 15 bp, Homo sapiens
ggtatttatctttct

SEQ ID NO: 87933 - DNA, 15 bp, Homo sapiens
gtatttatctttctg

SEQ ID NO: 87934 - DNA, 15 bp, Homo sapiens
tatttatctttctgt

SEQ ID NO: 87935 - DNA, 15 bp, Homo sapiens
atttatctttctgta

SEQ ID NO: 87936 - DNA, 15 bp, Homo sapiens
tttatctttctgtac

SEQ ID NO: 87937 - DNA, 15 bp, Homo sapiens
ttatctttctgtacc

SEQ ID NO: 87938 - DNA, 15 bp, Homo sapiens
tatctttctgtacct

SEQ ID NO: 87939 - DNA, 15 bp, Homo sapiens
atctttctgtacctg

SEQ ID NO: 87940 - DNA, 15 bp, Homo sapiens
tctttctgtacctga

SEQ ID NO: 87941 - DNA, 15 bp, Homo sapiens
ctttctgtacctgac

SEQ ID NO: 87942 - DNA, 15 bp, Homo sapiens
tttctgtacctgact

SEQ ID NO: 87943 - DNA, 15 bp, Homo sapiens
ttctgtacctgactt

SEQ ID NO: 87944 - DNA, 15 bp, Homo sapiens
tctgtacctgactta

SEQ ID NO: 87945 - DNA, 15 bp, Homo sapiens
ctgtacctgacttat

SEQ ID NO: 87946 - DNA, 15 bp, Homo sapiens
tgtacctgacttatt

SEQ ID NO: 87947 - DNA, 15 bp, Homo sapiens
gtacctgacttattt

SEQ ID NO: 87948 - DNA, 15 bp, Homo sapiens
tacctgacttatttt

SEQ ID NO: 87949 - DNA, 15 bp, Homo sapiens
acctgacttatttta

SEQ ID NO: 87950 - DNA, 15 bp, Homo sapiens
cctgacttattttac

SEQ ID NO: 87951 - DNA, 15 bp, Homo sapiens
ctgacttattttact

SEQ ID NO: 87952 - DNA, 15 bp, Homo sapiens
tgacttattttactt

SEQ ID NO: 87953 - DNA, 15 bp, Homo sapiens
gacttattttactta

SEQ ID NO: 87954 - DNA, 15 bp, Homo sapiens
acttattttacttaa

SEQ ID NO: 87955 - DNA, 15 bp, Homo sapiens
cttattttacttaac

SEQ ID NO: 87956 - DNA, 15 bp, Homo sapiens
ttattttacttaaca

SEQ ID NO: 87957 - DNA, 15 bp, Homo sapiens
tattttacttaacat

SEQ ID NO: 87958 - DNA, 15 bp, Homo sapiens
attttacttaacatc

SEQ ID NO: 87959 - DNA, 15 bp, Homo sapiens
ttttacttaacatca

SEQ ID NO: 87960 - DNA, 15 bp, Homo sapiens
tttacttaacatcat

SEQ ID NO: 87961 - DNA, 15 bp, Homo sapiens
ttacttaacatcatg

SEQ ID NO: 87962 - DNA, 15 bp, Homo sapiens
tacttaacatcatgt

SEQ ID NO: 87963 - DNA, 15 bp, Homo sapiens
acttaacatcatgtc

SEQ ID NO: 87964 - DNA, 15 bp, Homo sapiens
cttaacatcatgtcc

SEQ ID NO: 87965 - DNA, 15 bp, Homo sapiens
ttaacatcatgtcct

SEQ ID NO: 87966 - DNA, 15 bp, Homo sapiens
taacatcatgtcctc

SEQ ID NO: 87967 - DNA, 15 bp, Homo sapiens
aacatcatgtcctcc

SEQ ID NO: 87968 - DNA, 15 bp, Homo sapiens
acatcatgtcctccg

SEQ ID NO: 87969 - DNA, 15 bp, Homo sapiens
catcatgtcctccgg

SEQ ID NO: 87970 - DNA, 15 bp, Homo sapiens
atcatgtcctccggg

SEQ ID NO: 87971 - DNA, 15 bp, Homo sapiens
tcatgtcctccgggc

SEQ ID NO: 87972 - DNA, 15 bp, Homo sapiens
catgtcctccgggct

SEQ ID NO: 87973 - DNA, 15 bp, Homo sapiens
atgtcctccgggcta

SEQ ID NO: 87974 - DNA, 15 bp, Homo sapiens
tgtcctccgggctag

SEQ ID NO: 87975 - DNA, 15 bp, Homo sapiens
gtcctccgggctaga

SEQ ID NO: 87976 - DNA, 15 bp, Homo sapiens
tcctccgggctagac

SEQ ID NO: 87977 - DNA, 15 bp, Homo sapiens
cctccgggctagaca

SEQ ID NO: 87978 - DNA, 15 bp, Homo sapiens
ctccgggctagacat

SEQ ID NO: 87979 - DNA, 15 bp, Homo sapiens
tccgggctagacatt

SEQ ID NO: 87980 - DNA, 15 bp, Homo sapiens
ccgggctagacattc

SEQ ID NO: 87981 - DNA, 15 bp, Homo sapiens
cgggctagacattct

SEQ ID NO: 87982 - DNA, 15 bp, Homo sapiens
gggctagacattctc

SEQ ID NO: 87983 - DNA, 15 bp, Homo sapiens
ggctagacattctct

SEQ ID NO: 87984 - DNA, 15 bp, Homo sapiens
gctagacattctctt

SEQ ID NO: 87985 - DNA, 15 bp, Homo sapiens
ctagacattctcttt

SEQ ID NO: 87986 - DNA, 15 bp, Homo sapiens
tagacattctcttta

SEQ ID NO: 87987 - DNA, 15 bp, Homo sapiens
agacattctctttag

SEQ ID NO: 87988 - DNA, 15 bp, Homo sapiens
gacattctctttaga

SEQ ID NO: 87989 - DNA, 15 bp, Homo sapiens
acattctctttagaa

SEQ ID NO: 87990 - DNA, 15 bp, Homo sapiens
cattctctttagaat

SEQ ID NO: 87991 - DNA, 15 bp, Homo sapiens
attctctttagaatc

SEQ ID NO: 87992 - DNA, 15 bp, Homo sapiens
ttctctttagaatcc

SEQ ID NO: 87993 - DNA, 15 bp, Homo sapiens
tctctttagaatcca

SEQ ID NO: 87994 - DNA, 15 bp, Homo sapiens
ctctttagaatccac

SEQ ID NO: 87995 - DNA, 15 bp, Homo sapiens
tctttagaatccaca

SEQ ID NO: 87996 - DNA, 15 bp, Homo sapiens
ctttagaatccacag

SEQ ID NO: 87997 - DNA, 15 bp, Homo sapiens
tttagaatccacagg

SEQ ID NO: 87998 - DNA, 15 bp, Homo sapiens
ttagaatccacaggt

SEQ ID NO: 87999 - DNA, 15 bp, Homo sapiens
tagaatccacaggtt

SEQ ID NO: 88000 - DNA, 15 bp, Homo sapiens
agaatccacaggttt

SEQ ID NO: 88001 - DNA, 15 bp, Homo sapiens
gaatccacaggtttc

SEQ ID NO: 88002 - DNA, 15 bp, Homo sapiens
aatccacaggtttcc

SEQ ID NO: 88003 - DNA, 15 bp, Homo sapiens
atccacaggtttcct

SEQ ID NO: 88004 - DNA, 15 bp, Homo sapiens
tccacaggtttcctt

SEQ ID NO: 88005 - DNA, 15 bp, Homo sapiens
ccacaggtttccttt

SEQ ID NO: 88006 - DNA, 15 bp, Homo sapiens
cacaggtttcctttc

SEQ ID NO: 88007 - DNA, 15 bp, Homo sapiens
acaggtttcctttct

SEQ ID NO: 88008 - DNA, 15 bp, Homo sapiens
caggtttcctttctt

SEQ ID NO: 88009 - DNA, 15 bp, Homo sapiens
aggtttcctttcttt

SEQ ID NO: 88010 - DNA, 15 bp, Homo sapiens
ggtttcctttctttt

SEQ ID NO: 88011 - DNA, 15 bp, Homo sapiens
gtttcctttcttttc

SEQ ID NO: 88012 - DNA, 15 bp, Homo sapiens
tttcctttcttttct

SEQ ID NO: 88013 - DNA, 15 bp, Homo sapiens
ttcctttcttttctc

SEQ ID NO: 88014 - DNA, 15 bp, Homo sapiens
tcctttcttttctct

SEQ ID NO: 88015 - DNA, 15 bp, Homo sapiens
cctttcttttctcta

SEQ ID NO: 88016 - DNA, 15 bp, Homo sapiens
ctttcttttctctaa

SEQ ID NO: 88017 - DNA, 15 bp, Homo sapiens
tttcttttctctaaa

SEQ ID NO: 88018 - DNA, 15 bp, Homo sapiens
ttcttttctctaaat

SEQ ID NO: 88019 - DNA, 15 bp, Homo sapiens
tcttttctctaaatc

SEQ ID NO: 88020 - DNA, 15 bp, Homo sapiens
cttttctctaaatct

SEQ ID NO: 88021 - DNA, 15 bp, Homo sapiens
ttttctctaaatctg

SEQ ID NO: 88022 - DNA, 15 bp, Homo sapiens
tttctctaaatctgc

SEQ ID NO: 88023 - DNA, 15 bp, Homo sapiens
ttctctaaatctgca

SEQ ID NO: 88024 - DNA, 15 bp, Homo sapiens
tctctaaatctgcat

SEQ ID NO: 88025 - DNA, 15 bp, Homo sapiens
ctctaaatctgcatt

SEQ ID NO: 88026 - DNA, 15 bp, Homo sapiens
tctaaatctgcattt

SEQ ID NO: 88027 - DNA, 15 bp, Homo sapiens
ctaaatctgcatttt

SEQ ID NO: 88028 - DNA, 15 bp, Homo sapiens
taaatctgcattttg

SEQ ID NO: 88029 - DNA, 15 bp, Homo sapiens
aaatctgcattttgc

SEQ ID NO: 88030 - DNA, 15 bp, Homo sapiens
aatctgcattttgct

SEQ ID NO: 88031 - DNA, 15 bp, Homo sapiens
atctgcattttgctc

SEQ ID NO: 88032 - DNA, 15 bp, Homo sapiens
tctgcattttgctca

SEQ ID NO: 88033 - DNA, 15 bp, Homo sapiens
ctgcattttgctcag

SEQ ID NO: 88034 - DNA, 15 bp, Homo sapiens
tgcattttgctcagc

SEQ ID NO: 88035 - DNA, 15 bp, Homo sapiens
gcattttgctcagcc

SEQ ID NO: 88036 - DNA, 15 bp, Homo sapiens
cattttgctcagcca

SEQ ID NO: 88037 - DNA, 15 bp, Homo sapiens
attttgctcagccat

SEQ ID NO: 88038 - DNA, 15 bp, Homo sapiens
ttttgctcagccatt

SEQ ID NO: 88039 - DNA, 15 bp, Homo sapiens
tttgctcagccatta

SEQ ID NO: 88040 - DNA, 15 bp, Homo sapiens
ttgctcagccattaa

SEQ ID NO: 88041 - DNA, 15 bp, Homo sapiens
tgctcagccattaac

SEQ ID NO: 88042 - DNA, 15 bp, Homo sapiens
gctcagccattaact

SEQ ID NO: 88043 - DNA, 15 bp, Homo sapiens
ctcagccattaactt

SEQ ID NO: 88044 - DNA, 15 bp, Homo sapiens
tcagccattaacttt

SEQ ID NO: 88045 - DNA, 15 bp, Homo sapiens
cagccattaactttt

SEQ ID NO: 88046 - DNA, 15 bp, Homo sapiens
agccattaactttta

SEQ ID NO: 88047 - DNA, 15 bp, Homo sapiens
gccattaacttttaa

SEQ ID NO: 88048 - DNA, 15 bp, Homo sapiens
ccattaacttttaaa

SEQ ID NO: 88049 - DNA, 15 bp, Homo sapiens
cattaacttttaaaa

SEQ ID NO: 88050 - DNA, 15 bp, Homo sapiens
attaacttttaaaat

SEQ ID NO: 88051 - DNA, 15 bp, Homo sapiens
ttaacttttaaaatg

SEQ ID NO: 88052 - DNA, 15 bp, Homo sapiens
taacttttaaaatgt

SEQ ID NO: 88053 - DNA, 15 bp, Homo sapiens
aacttttaaaatgtc

SEQ ID NO: 88054 - DNA, 15 bp, Homo sapiens
acttttaaaatgtct

SEQ ID NO: 88055 - DNA, 15 bp, Homo sapiens
cttttaaaatgtctt

SEQ ID NO: 88056 - DNA, 15 bp, Homo sapiens
ttttaaaatgtcttt

SEQ ID NO: 88057 - DNA, 15 bp, Homo sapiens
tttaaaatgtctttt

SEQ ID NO: 88058 - DNA, 15 bp, Homo sapiens
ttaaaatgtcttttt

SEQ ID NO: 88059 - DNA, 15 bp, Homo sapiens
taaaatgtctttttc

SEQ ID NO: 88060 - DNA, 15 bp, Homo sapiens
aaaatgtctttttcc

SEQ ID NO: 88061 - DNA, 15 bp, Homo sapiens
aaatgtctttttccc

SEQ ID NO: 88062 - DNA, 15 bp, Homo sapiens
aatgtctttttccct

SEQ ID NO: 88063 - DNA, 15 bp, Homo sapiens
atgtctttttccctt

SEQ ID NO: 88064 - DNA, 15 bp, Homo sapiens
tgtctttttcccttt

SEQ ID NO: 88065 - DNA, 15 bp, Homo sapiens
gtctttttcccttta

SEQ ID NO: 88066 - DNA, 15 bp, Homo sapiens
tctttttccctttag

SEQ ID NO: 88067 - DNA, 15 bp, Homo sapiens
ctttttccctttagt

SEQ ID NO: 88068 - DNA, 15 bp, Homo sapiens
tttttccctttagtt

SEQ ID NO: 88069 - DNA, 15 bp, Homo sapiens
ttttccctttagttt

SEQ ID NO: 88070 - DNA, 15 bp, Homo sapiens
tttccctttagtttt

SEQ ID NO: 88071 - DNA, 15 bp, Homo sapiens
ttccctttagtttta

SEQ ID NO: 88072 - DNA, 15 bp, Homo sapiens
tccctttagttttat

SEQ ID NO: 88073 - DNA, 15 bp, Homo sapiens
ccctttagttttatt

SEQ ID NO: 88074 - DNA, 15 bp, Homo sapiens
cctttagttttattg

SEQ ID NO: 88075 - DNA, 15 bp, Homo sapiens
ctttagttttattgt

SEQ ID NO: 88076 - DNA, 15 bp, Homo sapiens
tttagttttattgtt

SEQ ID NO: 88077 - DNA, 15 bp, Homo sapiens
ttagttttattgttt

SEQ ID NO: 88078 - DNA, 15 bp, Homo sapiens
tagttttattgtttt

SEQ ID NO: 88079 - DNA, 15 bp, Homo sapiens
agttttattgttttc

SEQ ID NO: 88080 - DNA, 15 bp, Homo sapiens
gttttattgttttct

SEQ ID NO: 88081 - DNA, 15 bp, Homo sapiens
ttttattgttttcta

SEQ ID NO: 88082 - DNA, 15 bp, Homo sapiens
tttattgttttctat

SEQ ID NO: 88083 - DNA, 15 bp, Homo sapiens
ttattgttttctatt

SEQ ID NO: 88084 - DNA, 15 bp, Homo sapiens
tattgttttctattt

SEQ ID NO: 88085 - DNA, 15 bp, Homo sapiens
attgttttctatttt

SEQ ID NO: 88086 - DNA, 15 bp, Homo sapiens
ttgttttctatttta

SEQ ID NO: 88087 - DNA, 15 bp, Homo sapiens
tgttttctattttaa

SEQ ID NO: 88088 - DNA, 15 bp, Homo sapiens
gttttctattttaat

SEQ ID NO: 88089 - DNA, 15 bp, Homo sapiens
ttttctattttaata

SEQ ID NO: 88090 - DNA, 15 bp, Homo sapiens
tttctattttaatat

SEQ ID NO: 88091 - DNA, 15 bp, Homo sapiens
ttctattttaatatt

SEQ ID NO: 88092 - DNA, 15 bp, Homo sapiens
tctattttaatattg

SEQ ID NO: 88093 - DNA, 15 bp, Homo sapiens
ctattttaatattgc

SEQ ID NO: 88094 - DNA, 15 bp, Homo sapiens
tattttaatattgca

SEQ ID NO: 88095 - DNA, 15 bp, Homo sapiens
attttaatattgcaa

SEQ ID NO: 88096 - DNA, 15 bp, Homo sapiens
ttttaatattgcaag

SEQ ID NO: 88097 - DNA, 15 bp, Homo sapiens
tttaatattgcaaga

SEQ ID NO: 88098 - DNA, 15 bp, Homo sapiens
ttaatattgcaagat

SEQ ID NO: 88099 - DNA, 15 bp, Homo sapiens
taatattgcaagatg

SEQ ID NO: 88100 - DNA, 15 bp, Homo sapiens
aatattgcaagatgt

SEQ ID NO: 88101 - DNA, 15 bp, Homo sapiens
atattgcaagatgtt

SEQ ID NO: 88102 - DNA, 15 bp, Homo sapiens
tattgcaagatgttt

SEQ ID NO: 88103 - DNA, 15 bp, Homo sapiens
attgcaagatgtttt

SEQ ID NO: 88104 - DNA, 15 bp, Homo sapiens
ttgcaagatgtttta

SEQ ID NO: 88105 - DNA, 15 bp, Homo sapiens
tgcaagatgttttat

SEQ ID NO: 88106 - DNA, 15 bp, Homo sapiens
gcaagatgttttata

SEQ ID NO: 88107 - DNA, 15 bp, Homo sapiens
caagatgttttatat

SEQ ID NO: 88108 - DNA, 15 bp, Homo sapiens
aagatgttttatatt

SEQ ID NO: 88109 - DNA, 15 bp, Homo sapiens
agatgttttatattt

SEQ ID NO: 88110 - DNA, 15 bp, Homo sapiens
gatgttttatatttg

SEQ ID NO: 88111 - DNA, 15 bp, Homo sapiens
atgttttatatttgt

SEQ ID NO: 88112 - DNA, 15 bp, Homo sapiens
tgttttatatttgtg

SEQ ID NO: 88113 - DNA, 15 bp, Homo sapiens
gttttatatttgtga

SEQ ID NO: 88114 - DNA, 15 bp, Homo sapiens
ttttatatttgtgat

SEQ ID NO: 88115 - DNA, 15 bp, Homo sapiens
tttatatttgtgatt

SEQ ID NO: 88116 - DNA, 15 bp, Homo sapiens
ttatatttgtgatta

SEQ ID NO: 88117 - DNA, 15 bp, Homo sapiens
tatatttgtgattac

SEQ ID NO: 88118 - DNA, 15 bp, Homo sapiens
atatttgtgattaca

SEQ ID NO: 88119 - DNA, 15 bp, Homo sapiens
tatttgtgattacaa

SEQ ID NO: 88120 - DNA, 15 bp, Homo sapiens
atttgtgattacaaa

SEQ ID NO: 88121 - DNA, 15 bp, Homo sapiens
tttgtgattacaaat

SEQ ID NO: 88122 - DNA, 15 bp, Homo sapiens
ttgtgattacaaata

SEQ ID NO: 88123 - DNA, 15 bp, Homo sapiens
tgtgattacaaataa

SEQ ID NO: 88124 - DNA, 15 bp, Homo sapiens
gtgattacaaataaa

SEQ ID NO: 88125 - DNA, 15 bp, Homo sapiens
tgattacaaataaaa

SEQ ID NO: 88126 - DNA, 15 bp, Homo sapiens
gattacaaataaaaa

SEQ ID NO: 88127 - DNA, 15 bp, Homo sapiens
attacaaataaaaac

SEQ ID NO: 88128 - DNA, 15 bp, Homo sapiens
ttacaaataaaaact

SEQ ID NO: 88129 - DNA, 15 bp, Homo sapiens
tacaaataaaaactc

SEQ ID NO: 88130 - DNA, 15 bp, Homo sapiens
acaaataaaaactcc

SEQ ID NO: 88131 - DNA, 15 bp, Homo sapiens
caaataaaaactcca

SEQ ID NO: 88132 - DNA, 15 bp, Homo sapiens
aaataaaaactccat

SEQ ID NO: 88133 - DNA, 15 bp, Homo sapiens
aataaaaactccatt

SEQ ID NO: 88134 - DNA, 15 bp, Homo sapiens
ataaaaactccatta

SEQ ID NO: 88135 - DNA, 15 bp, Homo sapiens
taaaaactccattat

SEQ ID NO: 88136 - DNA, 15 bp, Homo sapiens
aaaaactccattatt

SEQ ID NO: 88137 - DNA, 15 bp, Homo sapiens
aaaactccattatta

SEQ ID NO: 88138 - DNA, 15 bp, Homo sapiens
aaactccattattag

SEQ ID NO: 88139 - DNA, 15 bp, Homo sapiens
aactccattattagt

SEQ ID NO: 88140 - DNA, 15 bp, Homo sapiens
actccattattagta

SEQ ID NO: 88141 - DNA, 15 bp, Homo sapiens
ctccattattagtaa

SEQ ID NO: 88142 - DNA, 15 bp, Homo sapiens
tccattattagtaaa

SEQ ID NO: 88143 - DNA, 15 bp, Homo sapiens
ccattattagtaaac

SEQ ID NO: 88144 - DNA, 15 bp, Homo sapiens
cattattagtaaaca

SEQ ID NO: 88145 - DNA, 15 bp, Homo sapiens
attattagtaaacaa

SEQ ID NO: 88146 - DNA, 15 bp, Homo sapiens
ttattagtaaacaaa

SEQ ID NO: 88147 - DNA, 15 bp, Homo sapiens
tattagtaaacaaat

SEQ ID NO: 88148 - DNA, 15 bp, Homo sapiens
attagtaaacaaata

SEQ ID NO: 88149 - DNA, 15 bp, Homo sapiens
ttagtaaacaaatac

SEQ ID NO: 88150 - DNA, 15 bp, Homo sapiens
tagtaaacaaataca

SEQ ID NO: 88151 - DNA, 15 bp, Homo sapiens
agtaaacaaatacaa

SEQ ID NO: 88152 - DNA, 15 bp, Homo sapiens
gtaaacaaatacaat

SEQ ID NO: 88153 - DNA, 15 bp, Homo sapiens
taaacaaatacaatg

SEQ ID NO: 88154 - DNA, 15 bp, Homo sapiens
aaacaaatacaatgt

SEQ ID NO: 88155 - DNA, 15 bp, Homo sapiens
aacaaatacaatgtc

SEQ ID NO: 88156 - DNA, 15 bp, Homo sapiens
acaaatacaatgtca

SEQ ID NO: 88157 - DNA, 15 bp, Homo sapiens
caaatacaatgtcat

SEQ ID NO: 88158 - DNA, 15 bp, Homo sapiens
aaatacaatgtcata

SEQ ID NO: 88159 - DNA, 15 bp, Homo sapiens
aatacaatgtcatat

SEQ ID NO: 88160 - DNA, 15 bp, Homo sapiens
atacaatgtcatata

SEQ ID NO: 88161 - DNA, 15 bp, Homo sapiens
tacaatgtcatatag

SEQ ID NO: 88162 - DNA, 15 bp, Homo sapiens
acaatgtcatatagt

SEQ ID NO: 88163 - DNA, 15 bp, Homo sapiens
caatgtcatatagta

SEQ ID NO: 88164 - DNA, 15 bp, Homo sapiens
aatgtcatatagtag

SEQ ID NO: 88165 - DNA, 15 bp, Homo sapiens
atgtcatatagtagt

SEQ ID NO: 88166 - DNA, 15 bp, Homo sapiens
tgtcatatagtagta

SEQ ID NO: 88167 - DNA, 15 bp, Homo sapiens
gtcatatagtagtaa

SEQ ID NO: 88168 - DNA, 15 bp, Homo sapiens
tcatatagtagtaag

SEQ ID NO: 88169 - DNA, 15 bp, Homo sapiens
catatagtagtaagt

SEQ ID NO: 88170 - DNA, 15 bp, Homo sapiens
atatagtagtaagtg

SEQ ID NO: 88171 - DNA, 15 bp, Homo sapiens
tatagtagtaagtgc

SEQ ID NO: 88172 - DNA, 15 bp, Homo sapiens
atagtagtaagtgct

SEQ ID NO: 88173 - DNA, 15 bp, Homo sapiens
tagtagtaagtgcta

SEQ ID NO: 88174 - DNA, 15 bp, Homo sapiens
agtagtaagtgctat

SEQ ID NO: 88175 - DNA, 15 bp, Homo sapiens
gtagtaagtgctata

SEQ ID NO: 88176 - DNA, 15 bp, Homo sapiens
tagtaagtgctataa

SEQ ID NO: 88177 - DNA, 15 bp, Homo sapiens
agtaagtgctataaa

SEQ ID NO: 88178 - DNA, 15 bp, Homo sapiens
gtaagtgctataaaa

SEQ ID NO: 88179 - DNA, 15 bp, Homo sapiens
taagtgctataaaaa

SEQ ID NO: 88180 - DNA, 15 bp, Homo sapiens
aagtgctataaaaaa

SEQ ID NO: 88181 - DNA, 15 bp, Homo sapiens
agtgctataaaaaat

SEQ ID NO: 88182 - DNA, 15 bp, Homo sapiens
gtgctataaaaaata

SEQ ID NO: 88183 - DNA, 15 bp, Homo sapiens
tgctataaaaaatag

SEQ ID NO: 88184 - DNA, 15 bp, Homo sapiens
gctataaaaaataga

SEQ ID NO: 88185 - DNA, 15 bp, Homo sapiens
ctataaaaaatagac

SEQ ID NO: 88186 - DNA, 15 bp, Homo sapiens
tataaaaaatagaca

SEQ ID NO: 88187 - DNA, 15 bp, Homo sapiens
ataaaaaatagacag

SEQ ID NO: 88188 - DNA, 15 bp, Homo sapiens
taaaaaatagacagg

SEQ ID NO: 88189 - DNA, 15 bp, Homo sapiens
aaaaaatagacagga

SEQ ID NO: 88190 - DNA, 15 bp, Homo sapiens
aaaaatagacaggat

SEQ ID NO: 88191 - DNA, 15 bp, Homo sapiens
aaaatagacaggata

SEQ ID NO: 88192 - DNA, 15 bp, Homo sapiens
aaatagacaggatag

SEQ ID NO: 88193 - DNA, 15 bp, Homo sapiens
aatagacaggataga

SEQ ID NO: 88194 - DNA, 15 bp, Homo sapiens
atagacaggatagaa

SEQ ID NO: 88195 - DNA, 15 bp, Homo sapiens
tagacaggatagaaa

SEQ ID NO: 88196 - DNA, 15 bp, Homo sapiens
agacaggatagaaag

SEQ ID NO: 88197 - DNA, 15 bp, Homo sapiens
gacaggatagaaagt

SEQ ID NO: 88198 - DNA, 15 bp, Homo sapiens
acaggatagaaagta

SEQ ID NO: 88199 - DNA, 15 bp, Homo sapiens
caggatagaaagtaa

SEQ ID NO: 88200 - DNA, 15 bp, Homo sapiens
aggatagaaagtaat

SEQ ID NO: 88201 - DNA, 15 bp, Homo sapiens
ggatagaaagtaatc

SEQ ID NO: 88202 - DNA, 15 bp, Homo sapiens
gatagaaagtaatct

SEQ ID NO: 88203 - DNA, 15 bp, Homo sapiens
atagaaagtaatctt

SEQ ID NO: 88204 - DNA, 15 bp, Homo sapiens
tagaaagtaatcttg

SEQ ID NO: 88205 - DNA, 15 bp, Homo sapiens
agaaagtaatcttgg

SEQ ID NO: 88206 - DNA, 15 bp, Homo sapiens
gaaagtaatcttggt

SEQ ID NO: 88207 - DNA, 15 bp, Homo sapiens
aaagtaatcttggtt

SEQ ID NO: 88208 - DNA, 15 bp, Homo sapiens
aagtaatcttggttt

SEQ ID NO: 88209 - DNA, 15 bp, Homo sapiens
agtaatcttggtttg

SEQ ID NO: 88210 - DNA, 15 bp, Homo sapiens
gtaatcttggtttgt

SEQ ID NO: 88211 - DNA, 15 bp, Homo sapiens
taatcttggtttgta

SEQ ID NO: 88212 - DNA, 15 bp, Homo sapiens
aatcttggtttgtat

SEQ ID NO: 88213 - DNA, 15 bp, Homo sapiens
atcttggtttgtatg

SEQ ID NO: 88214 - DNA, 15 bp, Homo sapiens
tcttggtttgtatgt

SEQ ID NO: 88215 - DNA, 15 bp, Homo sapiens
cttggtttgtatgtt

SEQ ID NO: 88216 - DNA, 15 bp, Homo sapiens
ttggtttgtatgttt

SEQ ID NO: 88217 - DNA, 15 bp, Homo sapiens
tggtttgtatgtttt

SEQ ID NO: 88218 - DNA, 15 bp, Homo sapiens
ggtttgtatgttttt

SEQ ID NO: 88219 - DNA, 15 bp, Homo sapiens
gtttgtatgtttttt

SEQ ID NO: 88220 - DNA, 15 bp, Homo sapiens
tttgtatgttttttg

SEQ ID NO: 88221 - DNA, 15 bp, Homo sapiens
ttgtatgttttttgt

SEQ ID NO: 88222 - DNA, 15 bp, Homo sapiens
tgtatgttttttgtt

SEQ ID NO: 88223 - DNA, 15 bp, Homo sapiens
gtatgttttttgttt

SEQ ID NO: 88224 - DNA, 15 bp, Homo sapiens
tatgttttttgtttt

SEQ ID NO: 88225 - DNA, 15 bp, Homo sapiens
atgttttttgttttt

SEQ ID NO: 88226 - DNA, 15 bp, Homo sapiens
tgttttttgtttttt

SEQ ID NO: 88227 - DNA, 15 bp, Homo sapiens
gttttttgtttttta

SEQ ID NO: 88228 - DNA, 15 bp, Homo sapiens
ttttttgttttttag

SEQ ID NO: 88229 - DNA, 15 bp, Homo sapiens
tttttgttttttagc

SEQ ID NO: 88230 - DNA, 15 bp, Homo sapiens
ttttgttttttagca

SEQ ID NO: 88231 - DNA, 15 bp, Homo sapiens
tttgttttttagcaa

SEQ ID NO: 88232 - DNA, 15 bp, Homo sapiens
ttgttttttagcaaa

SEQ ID NO: 88233 - DNA, 15 bp, Homo sapiens
tgttttttagcaaag

SEQ ID NO: 88234 - DNA, 15 bp, Homo sapiens
gttttttagcaaaga

SEQ ID NO: 88235 - DNA, 15 bp, Homo sapiens
ttttttagcaaagat

SEQ ID NO: 88236 - DNA, 15 bp, Homo sapiens
tttttagcaaagatg

SEQ ID NO: 88237 - DNA, 15 bp, Homo sapiens
ttttagcaaagatga

SEQ ID NO: 88238 - DNA, 15 bp, Homo sapiens
tttagcaaagatgat

SEQ ID NO: 88239 - DNA, 15 bp, Homo sapiens
ttagcaaagatgatt

SEQ ID NO: 88240 - DNA, 15 bp, Homo sapiens
tagcaaagatgatta

SEQ ID NO: 88241 - DNA, 15 bp, Homo sapiens
agcaaagatgattag

SEQ ID NO: 88242 - DNA, 15 bp, Homo sapiens
gcaaagatgattaga

SEQ ID NO: 88243 - DNA, 15 bp, Homo sapiens
caaagatgattagag

SEQ ID NO: 88244 - DNA, 15 bp, Homo sapiens
aaagatgattagaga

SEQ ID NO: 88245 - DNA, 15 bp, Homo sapiens
aagatgattagagaa

SEQ ID NO: 88246 - DNA, 15 bp, Homo sapiens
agatgattagagaag

SEQ ID NO: 88247 - DNA, 15 bp, Homo sapiens
gatgattagagaagg

SEQ ID NO: 88248 - DNA, 15 bp, Homo sapiens
atgattagagaaggc

SEQ ID NO: 88249 - DNA, 15 bp, Homo sapiens
tgattagagaaggcc

SEQ ID NO: 88250 - DNA, 15 bp, Homo sapiens
gattagagaaggccc

SEQ ID NO: 88251 - DNA, 15 bp, Homo sapiens
attagagaaggccca

SEQ ID NO: 88252 - DNA, 15 bp, Homo sapiens
ttagagaaggcccaa

SEQ ID NO: 88253 - DNA, 15 bp, Homo sapiens
tagagaaggcccaac

SEQ ID NO: 88254 - DNA, 15 bp, Homo sapiens
agagaaggcccaacc

SEQ ID NO: 88255 - DNA, 15 bp, Homo sapiens
gagaaggcccaacca

SEQ ID NO: 88256 - DNA, 15 bp, Homo sapiens
agaaggcccaaccaa

SEQ ID NO: 88257 - DNA, 15 bp, Homo sapiens
gaaggcccaaccaag

SEQ ID NO: 88258 - DNA, 15 bp, Homo sapiens
aaggcccaaccaagc

SEQ ID NO: 88259 - DNA, 15 bp, Homo sapiens
aggcccaaccaagca

SEQ ID NO: 88260 - DNA, 15 bp, Homo sapiens
ggcccaaccaagcag

SEQ ID NO: 88261 - DNA, 15 bp, Homo sapiens
gcccaaccaagcaga

SEQ ID NO: 88262 - DNA, 15 bp, Homo sapiens
cccaaccaagcagat

SEQ ID NO: 88263 - DNA, 15 bp, Homo sapiens
ccaaccaagcagata

SEQ ID NO: 88264 - DNA, 15 bp, Homo sapiens
caaccaagcagataa

SEQ ID NO: 88265 - DNA, 15 bp, Homo sapiens
aaccaagcagataac

SEQ ID NO: 88266 - DNA, 15 bp, Homo sapiens
accaagcagataaca

SEQ ID NO: 88267 - DNA, 15 bp, Homo sapiens
ccaagcagataacat

SEQ ID NO: 88268 - DNA, 15 bp, Homo sapiens
caagcagataacatt

SEQ ID NO: 88269 - DNA, 15 bp, Homo sapiens
aagcagataacattt

SEQ ID NO: 88270 - DNA, 15 bp, Homo sapiens
agcagataacattta

SEQ ID NO: 88271 - DNA, 15 bp, Homo sapiens
gcagataacatttaa

SEQ ID NO: 88272 - DNA, 15 bp, Homo sapiens
cagataacatttaag

SEQ ID NO: 88273 - DNA, 15 bp, Homo sapiens
agataacatttaagc

SEQ ID NO: 88274 - DNA, 15 bp, Homo sapiens
gataacatttaagca

SEQ ID NO: 88275 - DNA, 15 bp, Homo sapiens
ataacatttaagcag

SEQ ID NO: 88276 - DNA, 15 bp, Homo sapiens
taacatttaagcaga

SEQ ID NO: 88277 - DNA, 15 bp, Homo sapiens
aacatttaagcagag

SEQ ID NO: 88278 - DNA, 15 bp, Homo sapiens
acatttaagcagagg

SEQ ID NO: 88279 - DNA, 15 bp, Homo sapiens
catttaagcagaggc

SEQ ID NO: 88280 - DNA, 15 bp, Homo sapiens
atttaagcagaggcc

SEQ ID NO: 88281 - DNA, 15 bp, Homo sapiens
tttaagcagaggcct

SEQ ID NO: 88282 - DNA, 15 bp, Homo sapiens
ttaagcagaggccta

SEQ ID NO: 88283 - DNA, 15 bp, Homo sapiens
taagcagaggcctaa

SEQ ID NO: 88284 - DNA, 15 bp, Homo sapiens
aagcagaggcctaaa

SEQ ID NO: 88285 - DNA, 15 bp, Homo sapiens
agcagaggcctaaat

SEQ ID NO: 88286 - DNA, 15 bp, Homo sapiens
gcagaggcctaaatc

SEQ ID NO: 88287 - DNA, 15 bp, Homo sapiens
cagaggcctaaatca

SEQ ID NO: 88288 - DNA, 15 bp, Homo sapiens
agaggcctaaatcat

SEQ ID NO: 88289 - DNA, 15 bp, Homo sapiens
gaggcctaaatcata

SEQ ID NO: 88290 - DNA, 15 bp, Homo sapiens
aggcctaaatcatat

SEQ ID NO: 88291 - DNA, 15 bp, Homo sapiens
ggcctaaatcatata

SEQ ID NO: 88292 - DNA, 15 bp, Homo sapiens
gcctaaatcatataa

SEQ ID NO: 88293 - DNA, 15 bp, Homo sapiens
cctaaatcatataag

SEQ ID NO: 88294 - DNA, 15 bp, Homo sapiens
ctaaatcatataagt

SEQ ID NO: 88295 - DNA, 15 bp, Homo sapiens
taaatcatataagtg

SEQ ID NO: 88296 - DNA, 15 bp, Homo sapiens
aaatcatataagtga

SEQ ID NO: 88297 - DNA, 15 bp, Homo sapiens
aatcatataagtgag

SEQ ID NO: 88298 - DNA, 15 bp, Homo sapiens
atcatataagtgagt

SEQ ID NO: 88299 - DNA, 15 bp, Homo sapiens
tcatataagtgagtt

SEQ ID NO: 88300 - DNA, 15 bp, Homo sapiens
catataagtgagtta

SEQ ID NO: 88301 - DNA, 15 bp, Homo sapiens
atataagtgagttat

SEQ ID NO: 88302 - DNA, 15 bp, Homo sapiens
tataagtgagttata

SEQ ID NO: 88303 - DNA, 15 bp, Homo sapiens
ataagtgagttatac

SEQ ID NO: 88304 - DNA, 15 bp, Homo sapiens
taagtgagttataca

SEQ ID NO: 88305 - DNA, 15 bp, Homo sapiens
aagtgagttatacaa

SEQ ID NO: 88306 - DNA, 15 bp, Homo sapiens
agtgagttatacaaa

SEQ ID NO: 88307 - DNA, 15 bp, Homo sapiens
gtgagttatacaaat

SEQ ID NO: 88308 - DNA, 15 bp, Homo sapiens
tgagttatacaaata

SEQ ID NO: 88309 - DNA, 15 bp, Homo sapiens
gagttatacaaatat

SEQ ID NO: 88310 - DNA, 15 bp, Homo sapiens
agttatacaaatatc

SEQ ID NO: 88311 - DNA, 15 bp, Homo sapiens
gttatacaaatatct

SEQ ID NO: 88312 - DNA, 15 bp, Homo sapiens
ttatacaaatatctg

SEQ ID NO: 88313 - DNA, 15 bp, Homo sapiens
tatacaaatatctgg

SEQ ID NO: 88314 - DNA, 15 bp, Homo sapiens
atacaaatatctggg

SEQ ID NO: 88315 - DNA, 15 bp, Homo sapiens
tacaaatatctggga

SEQ ID NO: 88316 - DNA, 15 bp, Homo sapiens
acaaatatctgggaa

SEQ ID NO: 88317 - DNA, 15 bp, Homo sapiens
caaatatctgggaaa

SEQ ID NO: 88318 - DNA, 15 bp, Homo sapiens
aaatatctgggaaaa

SEQ ID NO: 88319 - DNA, 15 bp, Homo sapiens
aatatctgggaaaag

SEQ ID NO: 88320 - DNA, 15 bp, Homo sapiens
atatctgggaaaaga

SEQ ID NO: 88321 - DNA, 15 bp, Homo sapiens
tatctgggaaaagag

SEQ ID NO: 88322 - DNA, 15 bp, Homo sapiens
atctgggaaaagagt

SEQ ID NO: 88323 - DNA, 15 bp, Homo sapiens
tctgggaaaagagtt

SEQ ID NO: 88324 - DNA, 15 bp, Homo sapiens
ctgggaaaagagtta

SEQ ID NO: 88325 - DNA, 15 bp, Homo sapiens
tgggaaaagagttaa

SEQ ID NO: 88326 - DNA, 15 bp, Homo sapiens
gggaaaagagttaag

SEQ ID NO: 88327 - DNA, 15 bp, Homo sapiens
ggaaaagagttaaga

SEQ ID NO: 88328 - DNA, 15 bp, Homo sapiens
gaaaagagttaagag

SEQ ID NO: 88329 - DNA, 15 bp, Homo sapiens
aaaagagttaagagt

SEQ ID NO: 88330 - DNA, 15 bp, Homo sapiens
aaagagttaagagta

SEQ ID NO: 88331 - DNA, 15 bp, Homo sapiens
aagagttaagagtac

SEQ ID NO: 88332 - DNA, 15 bp, Homo sapiens
agagttaagagtaca

SEQ ID NO: 88333 - DNA, 15 bp, Homo sapiens
gagttaagagtacag

SEQ ID NO: 88334 - DNA, 15 bp, Homo sapiens
agttaagagtacaga

SEQ ID NO: 88335 - DNA, 15 bp, Homo sapiens
gttaagagtacagat

SEQ ID NO: 88336 - DNA, 15 bp, Homo sapiens
ttaagagtacagatg

SEQ ID NO: 88337 - DNA, 15 bp, Homo sapiens
taagagtacagatgc

SEQ ID NO: 88338 - DNA, 15 bp, Homo sapiens
aagagtacagatgca

SEQ ID NO: 88339 - DNA, 15 bp, Homo sapiens
agagtacagatgcaa

SEQ ID NO: 88340 - DNA, 15 bp, Homo sapiens
gagtacagatgcaaa

SEQ ID NO: 88341 - DNA, 15 bp, Homo sapiens
agtacagatgcaaaa

SEQ ID NO: 88342 - DNA, 15 bp, Homo sapiens
gtacagatgcaaaag

SEQ ID NO: 88343 - DNA, 15 bp, Homo sapiens
tacagatgcaaaagc

SEQ ID NO: 88344 - DNA, 15 bp, Homo sapiens
acagatgcaaaagcc

SEQ ID NO: 88345 - DNA, 15 bp, Homo sapiens
cagatgcaaaagccc

SEQ ID NO: 88346 - DNA, 15 bp, Homo sapiens
agatgcaaaagccct

SEQ ID NO: 88347 - DNA, 15 bp, Homo sapiens
gatgcaaaagccctt

SEQ ID NO: 88348 - DNA, 15 bp, Homo sapiens
atgcaaaagccctta

SEQ ID NO: 88349 - DNA, 15 bp, Homo sapiens
tgcaaaagcccttag

SEQ ID NO: 88350 - DNA, 15 bp, Homo sapiens
gcaaaagcccttaga

SEQ ID NO: 88351 - DNA, 15 bp, Homo sapiens
caaaagcccttagac

SEQ ID NO: 88352 - DNA, 15 bp, Homo sapiens
aaaagcccttagaca

SEQ ID NO: 88353 - DNA, 15 bp, Homo sapiens
aaagcccttagacaa

SEQ ID NO: 88354 - DNA, 15 bp, Homo sapiens
aagcccttagacaag

SEQ ID NO: 88355 - DNA, 15 bp, Homo sapiens
agcccttagacaaga

SEQ ID NO: 88356 - DNA, 15 bp, Homo sapiens
gcccttagacaagag

SEQ ID NO: 88357 - DNA, 15 bp, Homo sapiens
cccttagacaagaga

SEQ ID NO: 88358 - DNA, 15 bp, Homo sapiens
ccttagacaagagaa

SEQ ID NO: 88359 - DNA, 15 bp, Homo sapiens
cttagacaagagaat

SEQ ID NO: 88360 - DNA, 15 bp, Homo sapiens
ttagacaagagaatg

SEQ ID NO: 88361 - DNA, 15 bp, Homo sapiens
tagacaagagaatga

SEQ ID NO: 88362 - DNA, 15 bp, Homo sapiens
agacaagagaatgag

SEQ ID NO: 88363 - DNA, 15 bp, Homo sapiens
gacaagagaatgagc

SEQ ID NO: 88364 - DNA, 15 bp, Homo sapiens
acaagagaatgagct

SEQ ID NO: 88365 - DNA, 15 bp, Homo sapiens
caagagaatgagctt

SEQ ID NO: 88366 - DNA, 15 bp, Homo sapiens
aagagaatgagcttg

SEQ ID NO: 88367 - DNA, 15 bp, Homo sapiens
agagaatgagcttgg

SEQ ID NO: 88368 - DNA, 15 bp, Homo sapiens
gagaatgagcttggt

SEQ ID NO: 88369 - DNA, 15 bp, Homo sapiens
agaatgagcttggta

SEQ ID NO: 88370 - DNA, 15 bp, Homo sapiens
gaatgagcttggtat

SEQ ID NO: 88371 - DNA, 15 bp, Homo sapiens
aatgagcttggtata

SEQ ID NO: 88372 - DNA, 15 bp, Homo sapiens
atgagcttggtatat

SEQ ID NO: 88373 - DNA, 15 bp, Homo sapiens
tgagcttggtatatc

SEQ ID NO: 88374 - DNA, 15 bp, Homo sapiens
gagcttggtatatct

SEQ ID NO: 88375 - DNA, 15 bp, Homo sapiens
agcttggtatatctg

SEQ ID NO: 88376 - DNA, 15 bp, Homo sapiens
gcttggtatatctga

SEQ ID NO: 88377 - DNA, 15 bp, Homo sapiens
cttggtatatctgaa

SEQ ID NO: 88378 - DNA, 15 bp, Homo sapiens
ttggtatatctgaag

SEQ ID NO: 88379 - DNA, 15 bp, Homo sapiens
tggtatatctgaaga

SEQ ID NO: 88380 - DNA, 15 bp, Homo sapiens
ggtatatctgaagag

SEQ ID NO: 88381 - DNA, 15 bp, Homo sapiens
gtatatctgaagagt

SEQ ID NO: 88382 - DNA, 15 bp, Homo sapiens
tatatctgaagagtg

SEQ ID NO: 88383 - DNA, 15 bp, Homo sapiens
atatctgaagagtgg

SEQ ID NO: 88384 - DNA, 15 bp, Homo sapiens
tatctgaagagtgga

SEQ ID NO: 88385 - DNA, 15 bp, Homo sapiens
atctgaagagtggat

SEQ ID NO: 88386 - DNA, 15 bp, Homo sapiens
tctgaagagtggata

SEQ ID NO: 88387 - DNA, 15 bp, Homo sapiens
ctgaagagtggataa

SEQ ID NO: 88388 - DNA, 15 bp, Homo sapiens
tgaagagtggataag

SEQ ID NO: 88389 - DNA, 15 bp, Homo sapiens
gaagagtggataagt

SEQ ID NO: 88390 - DNA, 15 bp, Homo sapiens
aagagtggataagtc

SEQ ID NO: 88391 - DNA, 15 bp, Homo sapiens
agagtggataagtca

SEQ ID NO: 88392 - DNA, 15 bp, Homo sapiens
gagtggataagtcat

SEQ ID NO: 88393 - DNA, 15 bp, Homo sapiens
agtggataagtcatt

SEQ ID NO: 88394 - DNA, 15 bp, Homo sapiens
gtggataagtcattt

SEQ ID NO: 88395 - DNA, 15 bp, Homo sapiens
tggataagtcatttt

SEQ ID NO: 88396 - DNA, 15 bp, Homo sapiens
ggataagtcattttg

SEQ ID NO: 88397 - DNA, 15 bp, Homo sapiens
gataagtcattttga

SEQ ID NO: 88398 - DNA, 15 bp, Homo sapiens
ataagtcattttgac

SEQ ID NO: 88399 - DNA, 15 bp, Homo sapiens
taagtcattttgact

SEQ ID NO: 88400 - DNA, 15 bp, Homo sapiens
aagtcattttgactg

SEQ ID NO: 88401 - DNA, 15 bp, Homo sapiens
agtcattttgactga

SEQ ID NO: 88402 - DNA, 15 bp, Homo sapiens
gtcattttgactgaa

SEQ ID NO: 88403 - DNA, 15 bp, Homo sapiens
tcattttgactgaaa

SEQ ID NO: 88404 - DNA, 15 bp, Homo sapiens
cattttgactgaaac

SEQ ID NO: 88405 - DNA, 15 bp, Homo sapiens
attttgactgaaaca

SEQ ID NO: 88406 - DNA, 15 bp, Homo sapiens
ttttgactgaaacag

SEQ ID NO: 88407 - DNA, 15 bp, Homo sapiens
tttgactgaaacaga

SEQ ID NO: 88408 - DNA, 15 bp, Homo sapiens
ttgactgaaacagag

SEQ ID NO: 88409 - DNA, 15 bp, Homo sapiens
tgactgaaacagagt

SEQ ID NO: 88410 - DNA, 15 bp, Homo sapiens
gactgaaacagagtg

SEQ ID NO: 88411 - DNA, 15 bp, Homo sapiens
actgaaacagagtgg

SEQ ID NO: 88412 - DNA, 15 bp, Homo sapiens
ctgaaacagagtgga

SEQ ID NO: 88413 - DNA, 15 bp, Homo sapiens
tgaaacagagtggac

SEQ ID NO: 88414 - DNA, 15 bp, Homo sapiens
gaaacagagtggaca

SEQ ID NO: 88415 - DNA, 15 bp, Homo sapiens
aaacagagtggacaa

SEQ ID NO: 88416 - DNA, 15 bp, Homo sapiens
aacagagtggacaag

SEQ ID NO: 88417 - DNA, 15 bp, Homo sapiens
acagagtggacaaga

SEQ ID NO: 88418 - DNA, 15 bp, Homo sapiens
cagagtggacaagaa

SEQ ID NO: 88419 - DNA, 15 bp, Homo sapiens
agagtggacaagaaa

SEQ ID NO: 88420 - DNA, 15 bp, Homo sapiens
gagtggacaagaaaa

SEQ ID NO: 88421 - DNA, 15 bp, Homo sapiens
agtggacaagaaaac

SEQ ID NO: 88422 - DNA, 15 bp, Homo sapiens
gtggacaagaaaacc

SEQ ID NO: 88423 - DNA, 15 bp, Homo sapiens
tggacaagaaaacca

SEQ ID NO: 88424 - DNA, 15 bp, Homo sapiens
ggacaagaaaaccag

SEQ ID NO: 88425 - DNA, 15 bp, Homo sapiens
gacaagaaaaccagt

SEQ ID NO: 88426 - DNA, 15 bp, Homo sapiens
acaagaaaaccagtc

SEQ ID NO: 88427 - DNA, 15 bp, Homo sapiens
caagaaaaccagtcc

SEQ ID NO: 88428 - DNA, 15 bp, Homo sapiens
aagaaaaccagtcca

SEQ ID NO: 88429 - DNA, 15 bp, Homo sapiens
agaaaaccagtccaa

SEQ ID NO: 88430 - DNA, 15 bp, Homo sapiens
gaaaaccagtccaag

SEQ ID NO: 88431 - DNA, 15 bp, Homo sapiens
aaaaccagtccaagt

SEQ ID NO: 88432 - DNA, 15 bp, Homo sapiens
aaaccagtccaagtg

SEQ ID NO: 88433 - DNA, 15 bp, Homo sapiens
aaccagtccaagtgt

SEQ ID NO: 88434 - DNA, 15 bp, Homo sapiens
accagtccaagtgta

SEQ ID NO: 88435 - DNA, 15 bp, Homo sapiens
ccagtccaagtgtaa

SEQ ID NO: 88436 - DNA, 15 bp, Homo sapiens
cagtccaagtgtaaa

SEQ ID NO: 88437 - DNA, 15 bp, Homo sapiens
agtccaagtgtaaag

SEQ ID NO: 88438 - DNA, 15 bp, Homo sapiens
gtccaagtgtaaaga

SEQ ID NO: 88439 - DNA, 15 bp, Homo sapiens
tccaagtgtaaagac

SEQ ID NO: 88440 - DNA, 15 bp, Homo sapiens
ccaagtgtaaagaca

SEQ ID NO: 88441 - DNA, 15 bp, Homo sapiens
caagtgtaaagacac

SEQ ID NO: 88442 - DNA, 15 bp, Homo sapiens
aagtgtaaagacact

SEQ ID NO: 88443 - DNA, 15 bp, Homo sapiens
agtgtaaagacacta

SEQ ID NO: 88444 - DNA, 15 bp, Homo sapiens
gtgtaaagacactag

SEQ ID NO: 88445 - DNA, 15 bp, Homo sapiens
tgtaaagacactagt

SEQ ID NO: 88446 - DNA, 15 bp, Homo sapiens
gtaaagacactagtg

SEQ ID NO: 88447 - DNA, 15 bp, Homo sapiens
taaagacactagtgt

SEQ ID NO: 88448 - DNA, 15 bp, Homo sapiens
aaagacactagtgtg

SEQ ID NO: 88449 - DNA, 15 bp, Homo sapiens
aagacactagtgtgt

SEQ ID NO: 88450 - DNA, 15 bp, Homo sapiens
agacactagtgtgtg

SEQ ID NO: 88451 - DNA, 15 bp, Homo sapiens
gacactagtgtgtgt

SEQ ID NO: 88452 - DNA, 15 bp, Homo sapiens
acactagtgtgtgtt

SEQ ID NO: 88453 - DNA, 15 bp, Homo sapiens
cactagtgtgtgttc

SEQ ID NO: 88454 - DNA, 15 bp, Homo sapiens
actagtgtgtgttca

SEQ ID NO: 88455 - DNA, 15 bp, Homo sapiens
ctagtgtgtgttcag

SEQ ID NO: 88456 - DNA, 15 bp, Homo sapiens
tagtgtgtgttcagc

SEQ ID NO: 88457 - DNA, 15 bp, Homo sapiens
agtgtgtgttcagca

SEQ ID NO: 88458 - DNA, 15 bp, Homo sapiens
gtgtgtgttcagcat

SEQ ID NO: 88459 - DNA, 15 bp, Homo sapiens
tgtgtgttcagcata

SEQ ID NO: 88460 - DNA, 15 bp, Homo sapiens
gtgtgttcagcatag

SEQ ID NO: 88461 - DNA, 15 bp, Homo sapiens
tgtgttcagcatagg

SEQ ID NO: 88462 - DNA, 15 bp, Homo sapiens
gtgttcagcatagga

SEQ ID NO: 88463 - DNA, 15 bp, Homo sapiens
tgttcagcataggaa

SEQ ID NO: 88464 - DNA, 15 bp, Homo sapiens
gttcagcataggaag

SEQ ID NO: 88465 - DNA, 15 bp, Homo sapiens
ttcagcataggaagg

SEQ ID NO: 88466 - DNA, 15 bp, Homo sapiens
tcagcataggaagga

SEQ ID NO: 88467 - DNA, 15 bp, Homo sapiens
cagcataggaaggat

SEQ ID NO: 88468 - DNA, 15 bp, Homo sapiens
agcataggaaggatg

SEQ ID NO: 88469 - DNA, 15 bp, Homo sapiens
gcataggaaggatgt

SEQ ID NO: 88470 - DNA, 15 bp, Homo sapiens
cataggaaggatgta

SEQ ID NO: 88471 - DNA, 15 bp, Homo sapiens
ataggaaggatgtaa

SEQ ID NO: 88472 - DNA, 15 bp, Homo sapiens
taggaaggatgtaat

SEQ ID NO: 88473 - DNA, 15 bp, Homo sapiens
aggaaggatgtaatc

SEQ ID NO: 88474 - DNA, 15 bp, Homo sapiens
ggaaggatgtaatct

SEQ ID NO: 88475 - DNA, 15 bp, Homo sapiens
gaaggatgtaatctg

SEQ ID NO: 88476 - DNA, 15 bp, Homo sapiens
aaggatgtaatctga

SEQ ID NO: 88477 - DNA, 15 bp, Homo sapiens
aggatgtaatctgaa

SEQ ID NO: 88478 - DNA, 15 bp, Homo sapiens
ggatgtaatctgaat

SEQ ID NO: 88479 - DNA, 15 bp, Homo sapiens
gatgtaatctgaatt

SEQ ID NO: 88480 - DNA, 15 bp, Homo sapiens
atgtaatctgaattt

SEQ ID NO: 88481 - DNA, 15 bp, Homo sapiens
tgtaatctgaatttt

SEQ ID NO: 88482 - DNA, 15 bp, Homo sapiens
gtaatctgaattttg

SEQ ID NO: 88483 - DNA, 15 bp, Homo sapiens
taatctgaattttgt

SEQ ID NO: 88484 - DNA, 15 bp, Homo sapiens
aatctgaattttgtg

SEQ ID NO: 88485 - DNA, 15 bp, Homo sapiens
atctgaattttgtgt

SEQ ID NO: 88486 - DNA, 15 bp, Homo sapiens
tctgaattttgtgtt

SEQ ID NO: 88487 - DNA, 15 bp, Homo sapiens
ctgaattttgtgttt

SEQ ID NO: 88488 - DNA, 15 bp, Homo sapiens
tgaattttgtgttta

SEQ ID NO: 88489 - DNA, 15 bp, Homo sapiens
gaattttgtgtttaa

SEQ ID NO: 88490 - DNA, 15 bp, Homo sapiens
aattttgtgtttaat

SEQ ID NO: 88491 - DNA, 15 bp, Homo sapiens
attttgtgtttaata

SEQ ID NO: 88492 - DNA, 15 bp, Homo sapiens
ttttgtgtttaatat

SEQ ID NO: 88493 - DNA, 15 bp, Homo sapiens
tttgtgtttaatatt

SEQ ID NO: 88494 - DNA, 15 bp, Homo sapiens
ttgtgtttaatattc

SEQ ID NO: 88495 - DNA, 15 bp, Homo sapiens
tgtgtttaatattcc

SEQ ID NO: 88496 - DNA, 15 bp, Homo sapiens
gtgtttaatattccc

SEQ ID NO: 88497 - DNA, 15 bp, Homo sapiens
tgtttaatattccct

SEQ ID NO: 88498 - DNA, 15 bp, Homo sapiens
gtttaatattccctg

SEQ ID NO: 88499 - DNA, 15 bp, Homo sapiens
tttaatattccctgt

SEQ ID NO: 88500 - DNA, 15 bp, Homo sapiens
ttaatattccctgtg

SEQ ID NO: 88501 - DNA, 15 bp, Homo sapiens
taatattccctgtgt

SEQ ID NO: 88502 - DNA, 15 bp, Homo sapiens
aatattccctgtgtt

SEQ ID NO: 88503 - DNA, 15 bp, Homo sapiens
atattccctgtgttc

SEQ ID NO: 88504 - DNA, 15 bp, Homo sapiens
tattccctgtgttca

SEQ ID NO: 88505 - DNA, 15 bp, Homo sapiens
attccctgtgttcat

SEQ ID NO: 88506 - DNA, 15 bp, Homo sapiens
ttccctgtgttcatg

SEQ ID NO: 88507 - DNA, 15 bp, Homo sapiens
tccctgtgttcatgc

SEQ ID NO: 88508 - DNA, 15 bp, Homo sapiens
ccctgtgttcatgct

SEQ ID NO: 88509 - DNA, 15 bp, Homo sapiens
cctgtgttcatgctt

SEQ ID NO: 88510 - DNA, 15 bp, Homo sapiens
ctgtgttcatgcttt

SEQ ID NO: 88511 - DNA, 15 bp, Homo sapiens
tgtgttcatgctttc

SEQ ID NO: 88512 - DNA, 15 bp, Homo sapiens
gtgttcatgctttca

SEQ ID NO: 88513 - DNA, 15 bp, Homo sapiens
tgttcatgctttcaa

SEQ ID NO: 88514 - DNA, 15 bp, Homo sapiens
gttcatgctttcaaa

SEQ ID NO: 88515 - DNA, 15 bp, Homo sapiens
ttcatgctttcaaaa

SEQ ID NO: 88516 - DNA, 15 bp, Homo sapiens
tcatgctttcaaaat

SEQ ID NO: 88517 - DNA, 15 bp, Homo sapiens
catgctttcaaaata

SEQ ID NO: 88518 - DNA, 15 bp, Homo sapiens
atgctttcaaaatac

SEQ ID NO: 88519 - DNA, 15 bp, Homo sapiens
tgctttcaaaataca

SEQ ID NO: 88520 - DNA, 15 bp, Homo sapiens
gctttcaaaatacag

SEQ ID NO: 88521 - DNA, 15 bp, Homo sapiens
ctttcaaaatacaga

SEQ ID NO: 88522 - DNA, 15 bp, Homo sapiens
tttcaaaatacagat

SEQ ID NO: 88523 - DNA, 15 bp, Homo sapiens
ttcaaaatacagatg

SEQ ID NO: 88524 - DNA, 15 bp, Homo sapiens
tcaaaatacagatga

SEQ ID NO: 88525 - DNA, 15 bp, Homo sapiens
caaaatacagatgag

SEQ ID NO: 88526 - DNA, 15 bp, Homo sapiens
aaaatacagatgagt

SEQ ID NO: 88527 - DNA, 15 bp, Homo sapiens
aaatacagatgagtg

SEQ ID NO: 88528 - DNA, 15 bp, Homo sapiens
aatacagatgagtga

SEQ ID NO: 88529 - DNA, 15 bp, Homo sapiens
atacagatgagtgag

SEQ ID NO: 88530 - DNA, 15 bp, Homo sapiens
tacagatgagtgagg

SEQ ID NO: 88531 - DNA, 15 bp, Homo sapiens
acagatgagtgagga

SEQ ID NO: 88532 - DNA, 15 bp, Homo sapiens
cagatgagtgaggaa

SEQ ID NO: 88533 - DNA, 15 bp, Homo sapiens
agatgagtgaggaaa

SEQ ID NO: 88534 - DNA, 15 bp, Homo sapiens
gatgagtgaggaaag

SEQ ID NO: 88535 - DNA, 15 bp, Homo sapiens
atgagtgaggaaagt

SEQ ID NO: 88536 - DNA, 15 bp, Homo sapiens
tgagtgaggaaagta

SEQ ID NO: 88537 - DNA, 15 bp, Homo sapiens
gagtgaggaaagtag

SEQ ID NO: 88538 - DNA, 15 bp, Homo sapiens
agtgaggaaagtagg

SEQ ID NO: 88539 - DNA, 15 bp, Homo sapiens
gtgaggaaagtaggg

SEQ ID NO: 88540 - DNA, 15 bp, Homo sapiens
tgaggaaagtaggga

SEQ ID NO: 88541 - DNA, 15 bp, Homo sapiens
gaggaaagtagggag

SEQ ID NO: 88542 - DNA, 15 bp, Homo sapiens
aggaaagtagggaga

SEQ ID NO: 88543 - DNA, 15 bp, Homo sapiens
ggaaagtagggagaa

SEQ ID NO: 88544 - DNA, 15 bp, Homo sapiens
gaaagtagggagaag

SEQ ID NO: 88545 - DNA, 15 bp, Homo sapiens
aaagtagggagaagg

SEQ ID NO: 88546 - DNA, 15 bp, Homo sapiens
aagtagggagaaggg

SEQ ID NO: 88547 - DNA, 15 bp, Homo sapiens
agtagggagaagggg

SEQ ID NO: 88548 - DNA, 15 bp, Homo sapiens
gtagggagaaggggt

SEQ ID NO: 88549 - DNA, 15 bp, Homo sapiens
tagggagaaggggta

SEQ ID NO: 88550 - DNA, 15 bp, Homo sapiens
agggagaaggggtaa

SEQ ID NO: 88551 - DNA, 15 bp, Homo sapiens
gggagaaggggtaat

SEQ ID NO: 88552 - DNA, 15 bp, Homo sapiens
ggagaaggggtaata

SEQ ID NO: 88553 - DNA, 15 bp, Homo sapiens
gagaaggggtaataa

SEQ ID NO: 88554 - DNA, 15 bp, Homo sapiens
agaaggggtaataaa

SEQ ID NO: 88555 - DNA, 15 bp, Homo sapiens
gaaggggtaataaag

SEQ ID NO: 88556 - DNA, 15 bp, Homo sapiens
aaggggtaataaagg

SEQ ID NO: 88557 - DNA, 15 bp, Homo sapiens
aggggtaataaagga

SEQ ID NO: 88558 - DNA, 15 bp, Homo sapiens
ggggtaataaaggaa

SEQ ID NO: 88559 - DNA, 15 bp, Homo sapiens
gggtaataaaggaag

SEQ ID NO: 88560 - DNA, 15 bp, Homo sapiens
ggtaataaaggaagc

SEQ ID NO: 88561 - DNA, 15 bp, Homo sapiens
gtaataaaggaagct

SEQ ID NO: 88562 - DNA, 15 bp, Homo sapiens
taataaaggaagctg

SEQ ID NO: 88563 - DNA, 15 bp, Homo sapiens
aataaaggaagctga

SEQ ID NO: 88564 - DNA, 15 bp, Homo sapiens
ataaaggaagctgag

SEQ ID NO: 88565 - DNA, 15 bp, Homo sapiens
taaaggaagctgaga

SEQ ID NO: 88566 - DNA, 15 bp, Homo sapiens
aaaggaagctgagag

SEQ ID NO: 88567 - DNA, 15 bp, Homo sapiens
aaggaagctgagaga

SEQ ID NO: 88568 - DNA, 15 bp, Homo sapiens
aggaagctgagagat

SEQ ID NO: 88569 - DNA, 15 bp, Homo sapiens
ggaagctgagagatc

SEQ ID NO: 88570 - DNA, 15 bp, Homo sapiens
gaagctgagagatca

SEQ ID NO: 88571 - DNA, 15 bp, Homo sapiens
aagctgagagatcag

SEQ ID NO: 88572 - DNA, 15 bp, Homo sapiens
agctgagagatcagt

SEQ ID NO: 88573 - DNA, 15 bp, Homo sapiens
gctgagagatcagtt

SEQ ID NO: 88574 - DNA, 15 bp, Homo sapiens
ctgagagatcagtta

SEQ ID NO: 88575 - DNA, 15 bp, Homo sapiens
tgagagatcagttaa

SEQ ID NO: 88576 - DNA, 15 bp, Homo sapiens
gagagatcagttaag

SEQ ID NO: 88577 - DNA, 15 bp, Homo sapiens
agagatcagttaaga

SEQ ID NO: 88578 - DNA, 15 bp, Homo sapiens
gagatcagttaagag

SEQ ID NO: 88579 - DNA, 15 bp, Homo sapiens
agatcagttaagagg

SEQ ID NO: 88580 - DNA, 15 bp, Homo sapiens
gatcagttaagaggt

SEQ ID NO: 88581 - DNA, 15 bp, Homo sapiens
atcagttaagaggta

SEQ ID NO: 88582 - DNA, 15 bp, Homo sapiens
tcagttaagaggtac

SEQ ID NO: 88583 - DNA, 15 bp, Homo sapiens
cagttaagaggtact

SEQ ID NO: 88584 - DNA, 15 bp, Homo sapiens
agttaagaggtactt

SEQ ID NO: 88585 - DNA, 15 bp, Homo sapiens
gttaagaggtacttg

SEQ ID NO: 88586 - DNA, 15 bp, Homo sapiens
ttaagaggtacttga

SEQ ID NO: 88587 - DNA, 15 bp, Homo sapiens
taagaggtacttgaa

SEQ ID NO: 88588 - DNA, 15 bp, Homo sapiens
aagaggtacttgaat

SEQ ID NO: 88589 - DNA, 15 bp, Homo sapiens
agaggtacttgaata

SEQ ID NO: 88590 - DNA, 15 bp, Homo sapiens
gaggtacttgaatag

SEQ ID NO: 88591 - DNA, 15 bp, Homo sapiens
aggtacttgaatagt

SEQ ID NO: 88592 - DNA, 15 bp, Homo sapiens
ggtacttgaatagtt

SEQ ID NO: 88593 - DNA, 15 bp, Homo sapiens
gtacttgaatagttt

SEQ ID NO: 88594 - DNA, 15 bp, Homo sapiens
tacttgaatagttta

SEQ ID NO: 88595 - DNA, 15 bp, Homo sapiens
acttgaatagtttag

SEQ ID NO: 88596 - DNA, 15 bp, Homo sapiens
cttgaatagtttagt

SEQ ID NO: 88597 - DNA, 15 bp, Homo sapiens
ttgaatagtttagta

SEQ ID NO: 88598 - DNA, 15 bp, Homo sapiens
tgaatagtttagtaa

SEQ ID NO: 88599 - DNA, 15 bp, Homo sapiens
gaatagtttagtaaa

SEQ ID NO: 88600 - DNA, 15 bp, Homo sapiens
aatagtttagtaaag

SEQ ID NO: 88601 - DNA, 15 bp, Homo sapiens
atagtttagtaaaga

SEQ ID NO: 88602 - DNA, 15 bp, Homo sapiens
tagtttagtaaagat

SEQ ID NO: 88603 - DNA, 15 bp, Homo sapiens
agtttagtaaagatg

SEQ ID NO: 88604 - DNA, 15 bp, Homo sapiens
gtttagtaaagatga

SEQ ID NO: 88605 - DNA, 15 bp, Homo sapiens
tttagtaaagatgag

SEQ ID NO: 88606 - DNA, 15 bp, Homo sapiens
ttagtaaagatgaga

SEQ ID NO: 88607 - DNA, 15 bp, Homo sapiens
tagtaaagatgagag

SEQ ID NO: 88608 - DNA, 15 bp, Homo sapiens
agtaaagatgagaga

SEQ ID NO: 88609 - DNA, 15 bp, Homo sapiens
gtaaagatgagagaa

SEQ ID NO: 88610 - DNA, 15 bp, Homo sapiens
taaagatgagagaag

SEQ ID NO: 88611 - DNA, 15 bp, Homo sapiens
aaagatgagagaaga

SEQ ID NO: 88612 - DNA, 15 bp, Homo sapiens
aagatgagagaagat

SEQ ID NO: 88613 - DNA, 15 bp, Homo sapiens
agatgagagaagatg

SEQ ID NO: 88614 - DNA, 15 bp, Homo sapiens
gatgagagaagatgt

SEQ ID NO: 88615 - DNA, 15 bp, Homo sapiens
atgagagaagatgtt

SEQ ID NO: 88616 - DNA, 15 bp, Homo sapiens
tgagagaagatgttt

SEQ ID NO: 88617 - DNA, 15 bp, Homo sapiens
gagagaagatgtttg

SEQ ID NO: 88618 - DNA, 15 bp, Homo sapiens
agagaagatgtttgc

SEQ ID NO: 88619 - DNA, 15 bp, Homo sapiens
gagaagatgtttgct

SEQ ID NO: 88620 - DNA, 15 bp, Homo sapiens
agaagatgtttgctt

SEQ ID NO: 88621 - DNA, 15 bp, Homo sapiens
gaagatgtttgcttc

SEQ ID NO: 88622 - DNA, 15 bp, Homo sapiens
aagatgtttgcttct

SEQ ID NO: 88623 - DNA, 15 bp, Homo sapiens
agatgtttgcttctt

SEQ ID NO: 88624 - DNA, 15 bp, Homo sapiens
gatgtttgcttcttg

SEQ ID NO: 88625 - DNA, 15 bp, Homo sapiens
atgtttgcttcttgt

SEQ ID NO: 88626 - DNA, 15 bp, Homo sapiens
tgtttgcttcttgtt

SEQ ID NO: 88627 - DNA, 15 bp, Homo sapiens
gtttgcttcttgttg

SEQ ID NO: 88628 - DNA, 15 bp, Homo sapiens
tttgcttcttgttgc

SEQ ID NO: 88629 - DNA, 15 bp, Homo sapiens
ttgcttcttgttgcc

SEQ ID NO: 88630 - DNA, 15 bp, Homo sapiens
tgcttcttgttgccc

SEQ ID NO: 88631 - DNA, 15 bp, Homo sapiens
gcttcttgttgcccc

SEQ ID NO: 88632 - DNA, 15 bp, Homo sapiens
cttcttgttgcccct

SEQ ID NO: 88633 - DNA, 15 bp, Homo sapiens
ttcttgttgcccctc

SEQ ID NO: 88634 - DNA, 15 bp, Homo sapiens
tcttgttgcccctca

SEQ ID NO: 88635 - DNA, 15 bp, Homo sapiens
cttgttgcccctcac

SEQ ID NO: 88636 - DNA, 15 bp, Homo sapiens
ttgttgcccctcact

SEQ ID NO: 88637 - DNA, 15 bp, Homo sapiens
tgttgcccctcactg

SEQ ID NO: 88638 - DNA, 15 bp, Homo sapiens
gttgcccctcactgc

SEQ ID NO: 88639 - DNA, 15 bp, Homo sapiens
ttgcccctcactgct

SEQ ID NO: 88640 - DNA, 15 bp, Homo sapiens
tgcccctcactgctt

SEQ ID NO: 88641 - DNA, 15 bp, Homo sapiens
gcccctcactgctta

SEQ ID NO: 88642 - DNA, 15 bp, Homo sapiens
cccctcactgcttag

SEQ ID NO: 88643 - DNA, 15 bp, Homo sapiens
ccctcactgcttaga

SEQ ID NO: 88644 - DNA, 15 bp, Homo sapiens
cctcactgcttagaa

SEQ ID NO: 88645 - DNA, 15 bp, Homo sapiens
ctcactgcttagaat

SEQ ID NO: 88646 - DNA, 15 bp, Homo sapiens
tcactgcttagaata

SEQ ID NO: 88647 - DNA, 15 bp, Homo sapiens
cactgcttagaatag

SEQ ID NO: 88648 - DNA, 15 bp, Homo sapiens
actgcttagaatagt

SEQ ID NO: 88649 - DNA, 15 bp, Homo sapiens
ctgcttagaatagtg

SEQ ID NO: 88650 - DNA, 15 bp, Homo sapiens
tgcttagaatagtgg

SEQ ID NO: 88651 - DNA, 15 bp, Homo sapiens
gcttagaatagtggc

SEQ ID NO: 88652 - DNA, 15 bp, Homo sapiens
cttagaatagtggca

SEQ ID NO: 88653 - DNA, 15 bp, Homo sapiens
ttagaatagtggcag

SEQ ID NO: 88654 - DNA, 15 bp, Homo sapiens
tagaatagtggcagt

SEQ ID NO: 88655 - DNA, 15 bp, Homo sapiens
agaatagtggcagtg

SEQ ID NO: 88656 - DNA, 15 bp, Homo sapiens
gaatagtggcagtga

SEQ ID NO: 88657 - DNA, 15 bp, Homo sapiens
aatagtggcagtgaa

SEQ ID NO: 88658 - DNA, 15 bp, Homo sapiens
atagtggcagtgaag

SEQ ID NO: 88659 - DNA, 15 bp, Homo sapiens
tagtggcagtgaagg

SEQ ID NO: 88660 - DNA, 15 bp, Homo sapiens
agtggcagtgaaggg

SEQ ID NO: 88661 - DNA, 15 bp, Homo sapiens
gtggcagtgaagggt

SEQ ID NO: 88662 - DNA, 15 bp, Homo sapiens
tggcagtgaagggta

SEQ ID NO: 88663 - DNA, 15 bp, Homo sapiens
ggcagtgaagggtaa

SEQ ID NO: 88664 - DNA, 15 bp, Homo sapiens
gcagtgaagggtaac

SEQ ID NO: 88665 - DNA, 15 bp, Homo sapiens
cagtgaagggtaaca

SEQ ID NO: 88666 - DNA, 15 bp, Homo sapiens
agtgaagggtaacaa

SEQ ID NO: 88667 - DNA, 15 bp, Homo sapiens
gtgaagggtaacaag

SEQ ID NO: 88668 - DNA, 15 bp, Homo sapiens
tgaagggtaacaaga

SEQ ID NO: 88669 - DNA, 15 bp, Homo sapiens
gaagggtaacaagaa

SEQ ID NO: 88670 - DNA, 15 bp, Homo sapiens
aagggtaacaagaag

SEQ ID NO: 88671 - DNA, 15 bp, Homo sapiens
agggtaacaagaagc

SEQ ID NO: 88672 - DNA, 15 bp, Homo sapiens
gggtaacaagaagct

SEQ ID NO: 88673 - DNA, 15 bp, Homo sapiens
ggtaacaagaagctg

SEQ ID NO: 88674 - DNA, 15 bp, Homo sapiens
gtaacaagaagctgt

SEQ ID NO: 88675 - DNA, 15 bp, Homo sapiens
taacaagaagctgtc

SEQ ID NO: 88676 - DNA, 15 bp, Homo sapiens
aacaagaagctgtca

SEQ ID NO: 88677 - DNA, 15 bp, Homo sapiens
acaagaagctgtcag

SEQ ID NO: 88678 - DNA, 15 bp, Homo sapiens
caagaagctgtcaga

SEQ ID NO: 88679 - DNA, 15 bp, Homo sapiens
aagaagctgtcagat

SEQ ID NO: 88680 - DNA, 15 bp, Homo sapiens
agaagctgtcagatt

SEQ ID NO: 88681 - DNA, 15 bp, Homo sapiens
gaagctgtcagatta

SEQ ID NO: 88682 - DNA, 15 bp, Homo sapiens
aagctgtcagattaa

SEQ ID NO: 88683 - DNA, 15 bp, Homo sapiens
agctgtcagattaac

SEQ ID NO: 88684 - DNA, 15 bp, Homo sapiens
gctgtcagattaact

SEQ ID NO: 88685 - DNA, 15 bp, Homo sapiens
ctgtcagattaactt

SEQ ID NO: 88686 - DNA, 15 bp, Homo sapiens
tgtcagattaactta

SEQ ID NO: 88687 - DNA, 15 bp, Homo sapiens
gtcagattaacttaa

SEQ ID NO: 88688 - DNA, 15 bp, Homo sapiens
tcagattaacttaaa

SEQ ID NO: 88689 - DNA, 15 bp, Homo sapiens
cagattaacttaaag

SEQ ID NO: 88690 - DNA, 15 bp, Homo sapiens
agattaacttaaaga

SEQ ID NO: 88691 - DNA, 15 bp, Homo sapiens
gattaacttaaagag

SEQ ID NO: 88692 - DNA, 15 bp, Homo sapiens
attaacttaaagagt

SEQ ID NO: 88693 - DNA, 15 bp, Homo sapiens
ttaacttaaagagtt

SEQ ID NO: 88694 - DNA, 15 bp, Homo sapiens
taacttaaagagttt

SEQ ID NO: 88695 - DNA, 15 bp, Homo sapiens
aacttaaagagttta

SEQ ID NO: 88696 - DNA, 15 bp, Homo sapiens
acttaaagagtttac

SEQ ID NO: 88697 - DNA, 15 bp, Homo sapiens
cttaaagagtttact

SEQ ID NO: 88698 - DNA, 15 bp, Homo sapiens
ttaaagagtttactg

SEQ ID NO: 88699 - DNA, 15 bp, Homo sapiens
taaagagtttactga

SEQ ID NO: 88700 - DNA, 15 bp, Homo sapiens
aaagagtttactgat

SEQ ID NO: 88701 - DNA, 15 bp, Homo sapiens
aagagtttactgatg

SEQ ID NO: 88702 - DNA, 15 bp, Homo sapiens
agagtttactgatgc

SEQ ID NO: 88703 - DNA, 15 bp, Homo sapiens
gagtttactgatgca

SEQ ID NO: 88704 - DNA, 15 bp, Homo sapiens
agtttactgatgcag

SEQ ID NO: 88705 - DNA, 15 bp, Homo sapiens
gtttactgatgcagt

SEQ ID NO: 88706 - DNA, 15 bp, Homo sapiens
tttactgatgcagtg

SEQ ID NO: 88707 - DNA, 15 bp, Homo sapiens
ttactgatgcagtgg

SEQ ID NO: 88708 - DNA, 15 bp, Homo sapiens
tactgatgcagtgga

SEQ ID NO: 88709 - DNA, 15 bp, Homo sapiens
actgatgcagtggat

SEQ ID NO: 88710 - DNA, 15 bp, Homo sapiens
ctgatgcagtggatg

SEQ ID NO: 88711 - DNA, 15 bp, Homo sapiens
tgatgcagtggatgt

SEQ ID NO: 88712 - DNA, 15 bp, Homo sapiens
gatgcagtggatgtt

SEQ ID NO: 88713 - DNA, 15 bp, Homo sapiens
atgcagtggatgttg

SEQ ID NO: 88714 - DNA, 15 bp, Homo sapiens
tgcagtggatgttgg

SEQ ID NO: 88715 - DNA, 15 bp, Homo sapiens
gcagtggatgttggt

SEQ ID NO: 88716 - DNA, 15 bp, Homo sapiens
cagtggatgttggtt

SEQ ID NO: 88717 - DNA, 15 bp, Homo sapiens
agtggatgttggttg

SEQ ID NO: 88718 - DNA, 15 bp, Homo sapiens
gtggatgttggttgt

SEQ ID NO: 88719 - DNA, 15 bp, Homo sapiens
tggatgttggttgta

SEQ ID NO: 88720 - DNA, 15 bp, Homo sapiens
ggatgttggttgtaa

SEQ ID NO: 88721 - DNA, 15 bp, Homo sapiens
gatgttggttgtaag

SEQ ID NO: 88722 - DNA, 15 bp, Homo sapiens
atgttggttgtaaga

SEQ ID NO: 88723 - DNA, 15 bp, Homo sapiens
tgttggttgtaagag

SEQ ID NO: 88724 - DNA, 15 bp, Homo sapiens
gttggttgtaagaga

SEQ ID NO: 88725 - DNA, 15 bp, Homo sapiens
ttggttgtaagagaa

SEQ ID NO: 88726 - DNA, 15 bp, Homo sapiens
tggttgtaagagaag

SEQ ID NO: 88727 - DNA, 15 bp, Homo sapiens
ggttgtaagagaaga

SEQ ID NO: 88728 - DNA, 15 bp, Homo sapiens
gttgtaagagaagaa

SEQ ID NO: 88729 - DNA, 15 bp, Homo sapiens
ttgtaagagaagaat

SEQ ID NO: 88730 - DNA, 15 bp, Homo sapiens
tgtaagagaagaatt

SEQ ID NO: 88731 - DNA, 15 bp, Homo sapiens
gtaagagaagaattg

SEQ ID NO: 88732 - DNA, 15 bp, Homo sapiens
taagagaagaattga

SEQ ID NO: 88733 - DNA, 15 bp, Homo sapiens
aagagaagaattgat

SEQ ID NO: 88734 - DNA, 15 bp, Homo sapiens
agagaagaattgata

SEQ ID NO: 88735 - DNA, 15 bp, Homo sapiens
gagaagaattgataa

SEQ ID NO: 88736 - DNA, 15 bp, Homo sapiens
agaagaattgataat

SEQ ID NO: 88737 - DNA, 15 bp, Homo sapiens
gaagaattgataatg

SEQ ID NO: 88738 - DNA, 15 bp, Homo sapiens
aagaattgataatga

SEQ ID NO: 88739 - DNA, 15 bp, Homo sapiens
agaattgataatgac

SEQ ID NO: 88740 - DNA, 15 bp, Homo sapiens
gaattgataatgact

SEQ ID NO: 88741 - DNA, 15 bp, Homo sapiens
aattgataatgactc

SEQ ID NO: 88742 - DNA, 15 bp, Homo sapiens
attgataatgactct

SEQ ID NO: 88743 - DNA, 15 bp, Homo sapiens
ttgataatgactctt

SEQ ID NO: 88744 - DNA, 15 bp, Homo sapiens
tgataatgactcttg

SEQ ID NO: 88745 - DNA, 15 bp, Homo sapiens
gataatgactcttgg

SEQ ID NO: 88746 - DNA, 15 bp, Homo sapiens
ataatgactcttgga

SEQ ID NO: 88747 - DNA, 15 bp, Homo sapiens
taatgactcttggat

SEQ ID NO: 88748 - DNA, 15 bp, Homo sapiens
aatgactcttggata

SEQ ID NO: 88749 - DNA, 15 bp, Homo sapiens
atgactcttggataa

SEQ ID NO: 88750 - DNA, 15 bp, Homo sapiens
tgactcttggataat

SEQ ID NO: 88751 - DNA, 15 bp, Homo sapiens
gactcttggataata

SEQ ID NO: 88752 - DNA, 15 bp, Homo sapiens
actcttggataatag

SEQ ID NO: 88753 - DNA, 15 bp, Homo sapiens
ctcttggataatagg

SEQ ID NO: 88754 - DNA, 15 bp, Homo sapiens
tcttggataataggg

SEQ ID NO: 88755 - DNA, 15 bp, Homo sapiens
cttggataatagggg

SEQ ID NO: 88756 - DNA, 15 bp, Homo sapiens
ttggataatagggga

SEQ ID NO: 88757 - DNA, 15 bp, Homo sapiens
tggataataggggag

SEQ ID NO: 88758 - DNA, 15 bp, Homo sapiens
ggataataggggagg

SEQ ID NO: 88759 - DNA, 15 bp, Homo sapiens
gataataggggaggg

SEQ ID NO: 88760 - DNA, 15 bp, Homo sapiens
ataataggggaggga

SEQ ID NO: 88761 - DNA, 15 bp, Homo sapiens
taataggggagggag

SEQ ID NO: 88762 - DNA, 15 bp, Homo sapiens
aataggggagggagg

SEQ ID NO: 88763 - DNA, 15 bp, Homo sapiens
ataggggagggaggg

SEQ ID NO: 88764 - DNA, 15 bp, Homo sapiens
taggggagggagggg

SEQ ID NO: 88765 - DNA, 15 bp, Homo sapiens
aggggagggaggggc

SEQ ID NO: 88766 - DNA, 15 bp, Homo sapiens
ggggagggaggggct

SEQ ID NO: 88767 - DNA, 15 bp, Homo sapiens
gggagggaggggctg

SEQ ID NO: 88768 - DNA, 15 bp, Homo sapiens
ggagggaggggctgt

SEQ ID NO: 88769 - DNA, 15 bp, Homo sapiens
gagggaggggctgtc

SEQ ID NO: 88770 - DNA, 15 bp, Homo sapiens
agggaggggctgtca

SEQ ID NO: 88771 - DNA, 15 bp, Homo sapiens
gggaggggctgtcaa

SEQ ID NO: 88772 - DNA, 15 bp, Homo sapiens
ggaggggctgtcaat

SEQ ID NO: 88773 - DNA, 15 bp, Homo sapiens
gaggggctgtcaata

SEQ ID NO: 88774 - DNA, 15 bp, Homo sapiens
aggggctgtcaatat

SEQ ID NO: 88775 - DNA, 15 bp, Homo sapiens
ggggctgtcaatata

SEQ ID NO: 88776 - DNA, 15 bp, Homo sapiens
gggctgtcaatataa

SEQ ID NO: 88777 - DNA, 15 bp, Homo sapiens
ggctgtcaatataat

SEQ ID NO: 88778 - DNA, 15 bp, Homo sapiens
gctgtcaatataata

SEQ ID NO: 88779 - DNA, 15 bp, Homo sapiens
ctgtcaatataatat

SEQ ID NO: 88780 - DNA, 15 bp, Homo sapiens
tgtcaatataatata

SEQ ID NO: 88781 - DNA, 15 bp, Homo sapiens
gtcaatataatataa

SEQ ID NO: 88782 - DNA, 15 bp, Homo sapiens
tcaatataatataat

SEQ ID NO: 88783 - DNA, 15 bp, Homo sapiens
caatataatataatg

SEQ ID NO: 88784 - DNA, 15 bp, Homo sapiens
aatataatataatga

SEQ ID NO: 88785 - DNA, 15 bp, Homo sapiens
atataatataatgaa

SEQ ID NO: 88786 - DNA, 15 bp, Homo sapiens
tataatataatgaag

SEQ ID NO: 88787 - DNA, 15 bp, Homo sapiens
ataatataatgaaga

SEQ ID NO: 88788 - DNA, 15 bp, Homo sapiens
taatataatgaagaa

SEQ ID NO: 88789 - DNA, 15 bp, Homo sapiens
aatataatgaagaag

SEQ ID NO: 88790 - DNA, 15 bp, Homo sapiens
atataatgaagaagg

SEQ ID NO: 88791 - DNA, 15 bp, Homo sapiens
tataatgaagaaggg

SEQ ID NO: 88792 - DNA, 15 bp, Homo sapiens
ataatgaagaaggga

SEQ ID NO: 88793 - DNA, 15 bp, Homo sapiens
taatgaagaagggat

SEQ ID NO: 88794 - DNA, 15 bp, Homo sapiens
aatgaagaagggatt

SEQ ID NO: 88795 - DNA, 15 bp, Homo sapiens
atgaagaagggattt

SEQ ID NO: 88796 - DNA, 15 bp, Homo sapiens
tgaagaagggatttg

SEQ ID NO: 88797 - DNA, 15 bp, Homo sapiens
gaagaagggatttga

SEQ ID NO: 88798 - DNA, 15 bp, Homo sapiens
aagaagggatttgaa

SEQ ID NO: 88799 - DNA, 15 bp, Homo sapiens
agaagggatttgaag

SEQ ID NO: 88800 - DNA, 15 bp, Homo sapiens
gaagggatttgaagt

SEQ ID NO: 88801 - DNA, 15 bp, Homo sapiens
aagggatttgaagtc

SEQ ID NO: 88802 - DNA, 15 bp, Homo sapiens
agggatttgaagtca

SEQ ID NO: 88803 - DNA, 15 bp, Homo sapiens
gggatttgaagtcat

SEQ ID NO: 88804 - DNA, 15 bp, Homo sapiens
ggatttgaagtcatt

SEQ ID NO: 88805 - DNA, 15 bp, Homo sapiens
gatttgaagtcattt

SEQ ID NO: 88806 - DNA, 15 bp, Homo sapiens
atttgaagtcatttc

SEQ ID NO: 88807 - DNA, 15 bp, Homo sapiens
tttgaagtcatttct

SEQ ID NO: 88808 - DNA, 15 bp, Homo sapiens
ttgaagtcatttctg

SEQ ID NO: 88809 - DNA, 15 bp, Homo sapiens
tgaagtcatttctga

SEQ ID NO: 88810 - DNA, 15 bp, Homo sapiens
gaagtcatttctgat

SEQ ID NO: 88811 - DNA, 15 bp, Homo sapiens
aagtcatttctgatt

SEQ ID NO: 88812 - DNA, 15 bp, Homo sapiens
agtcatttctgattt

SEQ ID NO: 88813 - DNA, 15 bp, Homo sapiens
gtcatttctgattta

SEQ ID NO: 88814 - DNA, 15 bp, Homo sapiens
tcatttctgatttaa

SEQ ID NO: 88815 - DNA, 15 bp, Homo sapiens
catttctgatttaaa

SEQ ID NO: 88816 - DNA, 15 bp, Homo sapiens
atttctgatttaaat

SEQ ID NO: 88817 - DNA, 15 bp, Homo sapiens
tttctgatttaaatc

SEQ ID NO: 88818 - DNA, 15 bp, Homo sapiens
ttctgatttaaatct

SEQ ID NO: 88819 - DNA, 15 bp, Homo sapiens
tctgatttaaatctc

SEQ ID NO: 88820 - DNA, 15 bp, Homo sapiens
ctgatttaaatctca

SEQ ID NO: 88821 - DNA, 15 bp, Homo sapiens
tgatttaaatctcac

SEQ ID NO: 88822 - DNA, 15 bp, Homo sapiens
gatttaaatctcaca

SEQ ID NO: 88823 - DNA, 15 bp, Homo sapiens
atttaaatctcacat

SEQ ID NO: 88824 - DNA, 15 bp, Homo sapiens
tttaaatctcacatc

SEQ ID NO: 88825 - DNA, 15 bp, Homo sapiens
ttaaatctcacatcc

SEQ ID NO: 88826 - DNA, 15 bp, Homo sapiens
taaatctcacatcca

SEQ ID NO: 88827 - DNA, 15 bp, Homo sapiens
aaatctcacatccac

SEQ ID NO: 88828 - DNA, 15 bp, Homo sapiens
aatctcacatccact

SEQ ID NO: 88829 - DNA, 15 bp, Homo sapiens
atctcacatccacta

SEQ ID NO: 88830 - DNA, 15 bp, Homo sapiens
tctcacatccactac

SEQ ID NO: 88831 - DNA, 15 bp, Homo sapiens
ctcacatccactacc

SEQ ID NO: 88832 - DNA, 15 bp, Homo sapiens
tcacatccactacct

SEQ ID NO: 88833 - DNA, 15 bp, Homo sapiens
cacatccactaccta

SEQ ID NO: 88834 - DNA, 15 bp, Homo sapiens
acatccactacctac

SEQ ID NO: 88835 - DNA, 15 bp, Homo sapiens
catccactacctact

SEQ ID NO: 88836 - DNA, 15 bp, Homo sapiens
atccactacctactt

SEQ ID NO: 88837 - DNA, 15 bp, Homo sapiens
tccactacctacttt

SEQ ID NO: 88838 - DNA, 15 bp, Homo sapiens
ccactacctactttt

SEQ ID NO: 88839 - DNA, 15 bp, Homo sapiens
cactacctactttta

SEQ ID NO: 88840 - DNA, 15 bp, Homo sapiens
actacctacttttaa

SEQ ID NO: 88841 - DNA, 15 bp, Homo sapiens
ctacctacttttaat

SEQ ID NO: 88842 - DNA, 15 bp, Homo sapiens
tacctacttttaata

SEQ ID NO: 88843 - DNA, 15 bp, Homo sapiens
acctacttttaatag

SEQ ID NO: 88844 - DNA, 15 bp, Homo sapiens
cctacttttaataga

SEQ ID NO: 88845 - DNA, 15 bp, Homo sapiens
ctacttttaatagat

SEQ ID NO: 88846 - DNA, 15 bp, Homo sapiens
tacttttaatagata

SEQ ID NO: 88847 - DNA, 15 bp, Homo sapiens
acttttaatagatat

SEQ ID NO: 88848 - DNA, 15 bp, Homo sapiens
cttttaatagatatg

SEQ ID NO: 88849 - DNA, 15 bp, Homo sapiens
ttttaatagatatgt

SEQ ID NO: 88850 - DNA, 15 bp, Homo sapiens
tttaatagatatgta

SEQ ID NO: 88851 - DNA, 15 bp, Homo sapiens
ttaatagatatgtag

SEQ ID NO: 88852 - DNA, 15 bp, Homo sapiens
taatagatatgtagc

SEQ ID NO: 88853 - DNA, 15 bp, Homo sapiens
aatagatatgtagcc

SEQ ID NO: 88854 - DNA, 15 bp, Homo sapiens
atagatatgtagcct

SEQ ID NO: 88855 - DNA, 15 bp, Homo sapiens
tagatatgtagcctt

SEQ ID NO: 88856 - DNA, 15 bp, Homo sapiens
agatatgtagccttt

SEQ ID NO: 88857 - DNA, 15 bp, Homo sapiens
gatatgtagccttta

SEQ ID NO: 88858 - DNA, 15 bp, Homo sapiens
atatgtagcctttaa

SEQ ID NO: 88859 - DNA, 15 bp, Homo sapiens
tatgtagcctttaac

SEQ ID NO: 88860 - DNA, 15 bp, Homo sapiens
atgtagcctttaaca

SEQ ID NO: 88861 - DNA, 15 bp, Homo sapiens
tgtagcctttaacaa

SEQ ID NO: 88862 - DNA, 15 bp, Homo sapiens
gtagcctttaacaag

SEQ ID NO: 88863 - DNA, 15 bp, Homo sapiens
tagcctttaacaagt

SEQ ID NO: 88864 - DNA, 15 bp, Homo sapiens
agcctttaacaagtt

SEQ ID NO: 88865 - DNA, 15 bp, Homo sapiens
gcctttaacaagttc

SEQ ID NO: 88866 - DNA, 15 bp, Homo sapiens
cctttaacaagttcc

SEQ ID NO: 88867 - DNA, 15 bp, Homo sapiens
ctttaacaagttccc

SEQ ID NO: 88868 - DNA, 15 bp, Homo sapiens
tttaacaagttccct

SEQ ID NO: 88869 - DNA, 15 bp, Homo sapiens
ttaacaagttcccta

SEQ ID NO: 88870 - DNA, 15 bp, Homo sapiens
taacaagttccctaa

SEQ ID NO: 88871 - DNA, 15 bp, Homo sapiens
aacaagttccctaac

SEQ ID NO: 88872 - DNA, 15 bp, Homo sapiens
acaagttccctaacc

SEQ ID NO: 88873 - DNA, 15 bp, Homo sapiens
caagttccctaacct

SEQ ID NO: 88874 - DNA, 15 bp, Homo sapiens
aagttccctaacctt

SEQ ID NO: 88875 - DNA, 15 bp, Homo sapiens
agttccctaaccttt

SEQ ID NO: 88876 - DNA, 15 bp, Homo sapiens
gttccctaacctttc

SEQ ID NO: 88877 - DNA, 15 bp, Homo sapiens
ttccctaacctttct

SEQ ID NO: 88878 - DNA, 15 bp, Homo sapiens
tccctaacctttctg

SEQ ID NO: 88879 - DNA, 15 bp, Homo sapiens
ccctaacctttctgg

SEQ ID NO: 88880 - DNA, 15 bp, Homo sapiens
cctaacctttctggg

SEQ ID NO: 88881 - DNA, 15 bp, Homo sapiens
ctaacctttctgggc

SEQ ID NO: 88882 - DNA, 15 bp, Homo sapiens
taacctttctgggcc

SEQ ID NO: 88883 - DNA, 15 bp, Homo sapiens
aacctttctgggcct

SEQ ID NO: 88884 - DNA, 15 bp, Homo sapiens
acctttctgggcctt

SEQ ID NO: 88885 - DNA, 15 bp, Homo sapiens
cctttctgggcctta

SEQ ID NO: 88886 - DNA, 15 bp, Homo sapiens
ctttctgggccttag

SEQ ID NO: 88887 - DNA, 15 bp, Homo sapiens
tttctgggccttagc

SEQ ID NO: 88888 - DNA, 15 bp, Homo sapiens
ttctgggccttagct

SEQ ID NO: 88889 - DNA, 15 bp, Homo sapiens
tctgggccttagcta

SEQ ID NO: 88890 - DNA, 15 bp, Homo sapiens
ctgggccttagctac

SEQ ID NO: 88891 - DNA, 15 bp, Homo sapiens
tgggccttagctacc

SEQ ID NO: 88892 - DNA, 15 bp, Homo sapiens
gggccttagctacct

SEQ ID NO: 88893 - DNA, 15 bp, Homo sapiens
ggccttagctacctc

SEQ ID NO: 88894 - DNA, 15 bp, Homo sapiens
gccttagctacctcc

SEQ ID NO: 88895 - DNA, 15 bp, Homo sapiens
ccttagctacctccc

SEQ ID NO: 88896 - DNA, 15 bp, Homo sapiens
cttagctacctcccc

SEQ ID NO: 88897 - DNA, 15 bp, Homo sapiens
ttagctacctcccct

SEQ ID NO: 88898 - DNA, 15 bp, Homo sapiens
tagctacctcccctt

SEQ ID NO: 88899 - DNA, 15 bp, Homo sapiens
agctacctccccttg

SEQ ID NO: 88900 - DNA, 15 bp, Homo sapiens
gctacctccccttgg

SEQ ID NO: 88901 - DNA, 15 bp, Homo sapiens
ctacctccccttgga

SEQ ID NO: 88902 - DNA, 15 bp, Homo sapiens
tacctccccttggaa

SEQ ID NO: 88903 - DNA, 15 bp, Homo sapiens
acctccccttggaaa

SEQ ID NO: 88904 - DNA, 15 bp, Homo sapiens
cctccccttggaaat

SEQ ID NO: 88905 - DNA, 15 bp, Homo sapiens
ctccccttggaaatg

SEQ ID NO: 88906 - DNA, 15 bp, Homo sapiens
tccccttggaaatgg

SEQ ID NO: 88907 - DNA, 15 bp, Homo sapiens
ccccttggaaatgga

SEQ ID NO: 88908 - DNA, 15 bp, Homo sapiens
cccttggaaatggaa

SEQ ID NO: 88909 - DNA, 15 bp, Homo sapiens
ccttggaaatggaaa

SEQ ID NO: 88910 - DNA, 15 bp, Homo sapiens
cttggaaatggaaat

SEQ ID NO: 88911 - DNA, 15 bp, Homo sapiens
ttggaaatggaaata

SEQ ID NO: 88912 - DNA, 15 bp, Homo sapiens
tggaaatggaaatac

SEQ ID NO: 88913 - DNA, 15 bp, Homo sapiens
ggaaatggaaatacc

SEQ ID NO: 88914 - DNA, 15 bp, Homo sapiens
gaaatggaaatacct

SEQ ID NO: 88915 - DNA, 15 bp, Homo sapiens
aaatggaaataccta

SEQ ID NO: 88916 - DNA, 15 bp, Homo sapiens
aatggaaatacctaa

SEQ ID NO: 88917 - DNA, 15 bp, Homo sapiens
atggaaatacctaac

SEQ ID NO: 88918 - DNA, 15 bp, Homo sapiens
tggaaatacctaaca

SEQ ID NO: 88919 - DNA, 15 bp, Homo sapiens
ggaaatacctaacat

SEQ ID NO: 88920 - DNA, 15 bp, Homo sapiens
gaaatacctaacatg

SEQ ID NO: 88921 - DNA, 15 bp, Homo sapiens
aaatacctaacatgt

SEQ ID NO: 88922 - DNA, 15 bp, Homo sapiens
aatacctaacatgta

SEQ ID NO: 88923 - DNA, 15 bp, Homo sapiens
atacctaacatgtaa

SEQ ID NO: 88924 - DNA, 15 bp, Homo sapiens
tacctaacatgtaag

SEQ ID NO: 88925 - DNA, 15 bp, Homo sapiens
acctaacatgtaagg

SEQ ID NO: 88926 - DNA, 15 bp, Homo sapiens
cctaacatgtaaggt

SEQ ID NO: 88927 - DNA, 15 bp, Homo sapiens
ctaacatgtaaggtt

SEQ ID NO: 88928 - DNA, 15 bp, Homo sapiens
taacatgtaaggttg

SEQ ID NO: 88929 - DNA, 15 bp, Homo sapiens
aacatgtaaggttgt

SEQ ID NO: 88930 - DNA, 15 bp, Homo sapiens
acatgtaaggttgtt

SEQ ID NO: 88931 - DNA, 15 bp, Homo sapiens
catgtaaggttgttt

SEQ ID NO: 88932 - DNA, 15 bp, Homo sapiens
atgtaaggttgtttt

SEQ ID NO: 88933 - DNA, 15 bp, Homo sapiens
tgtaaggttgttttg

SEQ ID NO: 88934 - DNA, 15 bp, Homo sapiens
gtaaggttgttttga

SEQ ID NO: 88935 - DNA, 15 bp, Homo sapiens
taaggttgttttgac

SEQ ID NO: 88936 - DNA, 15 bp, Homo sapiens
aaggttgttttgaca

SEQ ID NO: 88937 - DNA, 15 bp, Homo sapiens
aggttgttttgacag

SEQ ID NO: 88938 - DNA, 15 bp, Homo sapiens
ggttgttttgacagt

SEQ ID NO: 88939 - DNA, 15 bp, Homo sapiens
gttgttttgacagtt

SEQ ID NO: 88940 - DNA, 15 bp, Homo sapiens
ttgttttgacagtta

SEQ ID NO: 88941 - DNA, 15 bp, Homo sapiens
tgttttgacagttat

SEQ ID NO: 88942 - DNA, 15 bp, Homo sapiens
gttttgacagttatt

SEQ ID NO: 88943 - DNA, 15 bp, Homo sapiens
ttttgacagttattt

SEQ ID NO: 88944 - DNA, 15 bp, Homo sapiens
tttgacagttatttt

SEQ ID NO: 88945 - DNA, 15 bp, Homo sapiens
ttgacagttattttc

SEQ ID NO: 88946 - DNA, 15 bp, Homo sapiens
tgacagttattttca

SEQ ID NO: 88947 - DNA, 15 bp, Homo sapiens
gacagttattttcac

SEQ ID NO: 88948 - DNA, 15 bp, Homo sapiens
acagttattttcact

SEQ ID NO: 88949 - DNA, 15 bp, Homo sapiens
cagttattttcacta

SEQ ID NO: 88950 - DNA, 15 bp, Homo sapiens
agttattttcactag

SEQ ID NO: 88951 - DNA, 15 bp, Homo sapiens
gttattttcactagg

SEQ ID NO: 88952 - DNA, 15 bp, Homo sapiens
ttattttcactaggc

SEQ ID NO: 88953 - DNA, 15 bp, Homo sapiens
tattttcactaggca

SEQ ID NO: 88954 - DNA, 15 bp, Homo sapiens
attttcactaggcat

SEQ ID NO: 88955 - DNA, 15 bp, Homo sapiens
ttttcactaggcatg

SEQ ID NO: 88956 - DNA, 15 bp, Homo sapiens
tttcactaggcatgt

SEQ ID NO: 88957 - DNA, 15 bp, Homo sapiens
ttcactaggcatgta

SEQ ID NO: 88958 - DNA, 15 bp, Homo sapiens
tcactaggcatgtaa

SEQ ID NO: 88959 - DNA, 15 bp, Homo sapiens
cactaggcatgtaaa

SEQ ID NO: 88960 - DNA, 15 bp, Homo sapiens
actaggcatgtaaag

SEQ ID NO: 88961 - DNA, 15 bp, Homo sapiens
ctaggcatgtaaagg

SEQ ID NO: 88962 - DNA, 15 bp, Homo sapiens
taggcatgtaaaggc

SEQ ID NO: 88963 - DNA, 15 bp, Homo sapiens
aggcatgtaaaggca

SEQ ID NO: 88964 - DNA, 15 bp, Homo sapiens
ggcatgtaaaggcac

SEQ ID NO: 88965 - DNA, 15 bp, Homo sapiens
gcatgtaaaggcact

SEQ ID NO: 88966 - DNA, 15 bp, Homo sapiens
catgtaaaggcactt

SEQ ID NO: 88967 - DNA, 15 bp, Homo sapiens
atgtaaaggcacttg

SEQ ID NO: 88968 - DNA, 15 bp, Homo sapiens
tgtaaaggcacttga

SEQ ID NO: 88969 - DNA, 15 bp, Homo sapiens
gtaaaggcacttgac

SEQ ID NO: 88970 - DNA, 15 bp, Homo sapiens
taaaggcacttgact

SEQ ID NO: 88971 - DNA, 15 bp, Homo sapiens
aaaggcacttgactc

SEQ ID NO: 88972 - DNA, 15 bp, Homo sapiens
aaggcacttgactct

SEQ ID NO: 88973 - DNA, 15 bp, Homo sapiens
aggcacttgactctc

SEQ ID NO: 88974 - DNA, 15 bp, Homo sapiens
ggcacttgactctct

SEQ ID NO: 88975 - DNA, 15 bp, Homo sapiens
gcacttgactctctg

SEQ ID NO: 88976 - DNA, 15 bp, Homo sapiens
cacttgactctctgt

SEQ ID NO: 88977 - DNA, 15 bp, Homo sapiens
acttgactctctgtt

SEQ ID NO: 88978 - DNA, 15 bp, Homo sapiens
cttgactctctgtta

SEQ ID NO: 88979 - DNA, 15 bp, Homo sapiens
ttgactctctgttat

SEQ ID NO: 88980 - DNA, 15 bp, Homo sapiens
tgactctctgttata

SEQ ID NO: 88981 - DNA, 15 bp, Homo sapiens
gactctctgttatag

SEQ ID NO: 88982 - DNA, 15 bp, Homo sapiens
actctctgttataga

SEQ ID NO: 88983 - DNA, 15 bp, Homo sapiens
ctctctgttatagac

SEQ ID NO: 88984 - DNA, 15 bp, Homo sapiens
tctctgttatagacc

SEQ ID NO: 88985 - DNA, 15 bp, Homo sapiens
ctctgttatagacca

SEQ ID NO: 88986 - DNA, 15 bp, Homo sapiens
tctgttatagaccac

SEQ ID NO: 88987 - DNA, 15 bp, Homo sapiens
ctgttatagaccact

SEQ ID NO: 88988 - DNA, 15 bp, Homo sapiens
tgttatagaccactg

SEQ ID NO: 88989 - DNA, 15 bp, Homo sapiens
gttatagaccactgt

SEQ ID NO: 88990 - DNA, 15 bp, Homo sapiens
ttatagaccactgta

SEQ ID NO: 88991 - DNA, 15 bp, Homo sapiens
tatagaccactgtat

SEQ ID NO: 88992 - DNA, 15 bp, Homo sapiens
atagaccactgtatt

SEQ ID NO: 88993 - DNA, 15 bp, Homo sapiens
tagaccactgtatta

SEQ ID NO: 88994 - DNA, 15 bp, Homo sapiens
agaccactgtattat

SEQ ID NO: 88995 - DNA, 15 bp, Homo sapiens
gaccactgtattatg

SEQ ID NO: 88996 - DNA, 15 bp, Homo sapiens
accactgtattatgt

SEQ ID NO: 88997 - DNA, 15 bp, Homo sapiens
ccactgtattatgtt

SEQ ID NO: 88998 - DNA, 15 bp, Homo sapiens
cactgtattatgtta

SEQ ID NO: 88999 - DNA, 15 bp, Homo sapiens
actgtattatgttaa

SEQ ID NO: 89000 - DNA, 15 bp, Homo sapiens
ctgtattatgttaat

SEQ ID NO: 89001 - DNA, 15 bp, Homo sapiens
tgtattatgttaatg

SEQ ID NO: 89002 - DNA, 15 bp, Homo sapiens
gtattatgttaatgt

SEQ ID NO: 89003 - DNA, 15 bp, Homo sapiens
tattatgttaatgtc

SEQ ID NO: 89004 - DNA, 15 bp, Homo sapiens
attatgttaatgtcc

SEQ ID NO: 89005 - DNA, 15 bp, Homo sapiens
ttatgttaatgtccc

SEQ ID NO: 89006 - DNA, 15 bp, Homo sapiens
tatgttaatgtccct

SEQ ID NO: 89007 - DNA, 15 bp, Homo sapiens
atgttaatgtccctc

SEQ ID NO: 89008 - DNA, 15 bp, Homo sapiens
tctggagcagagata

SEQ ID NO: 89009 - DNA, 15 bp, Homo sapiens
tccaagtacttccat

SEQ ID NO: 89010 - DNA, 15 bp, Homo sapiens
tgatttcccttagga

SEQ ID NO: 89011 - DNA, 15 bp, Homo sapiens
tatctaacgagacct

SEQ ID NO: 89012 - DNA, 15 bp, Homo sapiens
tcatttcttctgttg

SEQ ID NO: 89013 - DNA, 15 bp, Homo sapiens
tatgtagctttggaa

SEQ ID NO: 89014 - DNA, 15 bp, Homo sapiens
gataggtacagctgt

SEQ ID NO: 89015 - DNA, 15 bp, Homo sapiens
taaacagcaacataa

SEQ ID NO: 89016 - DNA, 15 bp, Homo sapiens
tgaatcggaagggtt

SEQ ID NO: 89017 - DNA, 15 bp, Homo sapiens
taatatgagcaggtg

SEQ ID NO: 89018 - DNA, 15 bp, Homo sapiens
ctcatccaattcact

SEQ ID NO: 89019 - DNA, 15 bp, Homo sapiens
tcaaggaaggatggt

SEQ ID NO: 89020 - DNA, 8 bp, Homo sapiens
agccctgt

SEQ ID NO: 89021 - DNA, 8 bp, Homo sapiens
ccaaccat

SEQ ID NO: 89022 - DNA, 15 bp, Homo sapiens
ttgtagacagcatat

SEQ ID NO: 89023 - DNA, 15 bp, Homo sapiens
ttcttatacattctg

SEQ ID NO: 89024 - DNA, 8 bp, Homo sapiens
gccttttg

SEQ ID NO: 89025 - DNA, 8 bp, Homo sapiens
ctgttcaa

SEQ ID NO: 89026 - DNA, 15 bp, Homo sapiens
tgcacaggtcccgcc

SEQ ID NO: 89027 - DNA, 15 bp, Homo sapiens
tttcccgctgaagca

SEQ ID NO: 89028 - DNA, 15 bp, Homo sapiens
ttgtcataccaggaa

SEQ ID NO: 89029 - DNA, 789 bp, Homo sapiens
  misc_feature (9)..(30): n is a, c, g, or t
taaacgggnaaagatgccttnctttttaancctaattgaattttaaatgtccttttgacacaaaaaggtatatacatgacacagctacacaaccttttttcaactggacaacaagtgtcaaaaccctgtggatgtatagggtaaaacaagattggtcaggaaaagagaattgttcctataactggtaatctgacacaatgtcctattgccattaaaaaaaaaaggtccattttcagtttattcaagtttattttcatggtgttttatccctcttgataaaaaaaaattcagacttttgtaatttgtgtatgctgatcttcatcaaaaggttcattctctggatcagagtcagtggtgtcagaatatctataatgatcaggttcattgtcactaacatctgttgttacagaagtttaacttgctagcctccggatttgacggctcctctactgcctttgagaagtacagtttcaccttaaattttggagaaaacgttcacgttgactttgtctttattttcttacggcaagacaattttttgttataagtaagttcctatacttcccttgcatttattttacaccctcctatatctgtcaatctttatctatttttttgtttaacaataaacccactaatttccctactttttcttccaacgttatccacctatcacctggatcataaataatgtttttcttccccataagttcaaaactttttccccctctttttttccacccctctttttgattcttcgcaataaacctttatttgttttctccccac

SEQ ID NO: 89030 - DNA, 467 bp, Homo sapiens
aagaaatggcatatttgaagaaatcatatggctagacaaaacaaactagatagattgtgaagctagatagactaaacctcagtcttgattactaattacaagctgaatgtataaatcttttccttcagaggcataaaggtaagagttatgaatcaaatggaaggaccaaaatgcttcccaatgaagtattttcttggtgaagttattgcaatctaaggtctgaaaatcagctgtacaggaactttatcagtaacctaaaagatgatcaatcagcctcagtgactaacgacactgagaagagaccaacgtaaaaactagcacaccagattaatttaccacaaagatattctcaccataatcagaaaacctgccctctattcagagtattcactcttttttggtatgagtactaatctggctgggtcgaattagtgcttagttgaatacagaattaaaataatgtgaag
